United States Patent Application Publication US 2022/0008368 A1 - sequence listing, part 13

SEQ ID NO: 2 - DNA, 58617616 bp, Homo sapiens (residues 26,052,277-28,223,299 of 58,617,616)
  modified_base (1)..(60000): a, c, t, g, unknown or other
  modified_base (24448981)..(24498980): a, c, t, g, unknown or other
  modified_base (24552653)..(24552752): a, c, t, g, unknown or other
  modified_base (24891257)..(24891356): a, c, t, g, unknown or other
  modified_base (24895791)..(24895890): a, c, t, g, unknown or other
  modified_base (24898314)..(24904771): a, c, t, g, unknown or other
  modified_base (24908590)..(24908689): a, c, t, g, unknown or other
  modified_base (27190875)..(27240874): a, c, t, g, unknown or other
  modified_base (58607617)..(58617616): a, c, t, g, unknown or other
atattcagacctctttgaagccttcgttggaaacgggatttcttcatgttatgctagacagaagaattcccagtaacttccttgtgttgtgtgtgttcaactcacagagttgaactctcatttacacagagcagatttgaaacactctttttgtggaatttgcaagtggagatttcaagtgctttgaggccaaaggcagaaaaggaaatatcttcgtataaaaactagacagaatcattctcagaaactgctatgcgatgtgtgcgttcaactctcagagtttaacttttcttttcattcagcagtttggaaacactctgtttgtaaagtctgcacgtggataacttgacctacttagaggccttcgttggaaacgggtttttttcatgtaaggctagacagaagaattcccagtaacttccttgtgttgtgtgcattcaactcacagagttgaacgttcccttagacagagcagatttgaaacactctatttgtccaatttgcaagtgtagatttcaagcgctttaaggtcaacggcagaaaaggaaatatcttcgtttcaaaactagacagattcattcccacaaactgcgttgtgatgtgttcgttcaactcacagagtttaacctttctgttcatagagcagttaggaaacactctgtttgtaaagtctgccagtggatattcagacctccttgaggccttcgttggaaacgggatttcttcatattctgctagacagaagaattctcagaatcttccttgtgttgtgtgtattcaactcacagagttgaacgatggtttacacagagcagatttgaaacactctttttgtggaatttgcaagtggagatttcagccgctttgaggtcaatggtagaaaagtaaatatcttcatataaaaactagacagaatgattctcagaaacttctttgtgatgtgtgcgttcaactcacagagtttaacctttcttttcatagagcagttaggaaacactctgtttgtaaagtctgcaagtggatattcagacctgtttgaggccttcgttggaaacgggatttctccatactatgctagacagaagaattctcagtaacttccttgtgttgtgtgtattcaactgacagagttgaactatcatttagagagagcagatttgaaacactgttttgtggaatttgcaagtggagatttcaagcgctttggggccaaaggcagaaaaggaaatatcttcgtataaaaactagacagaatcattctcagaaactgctctgcgatgtgtgcgttcaactctcagagtttaacttttcttttcattcaacagtttggaaacactctgtttgtaaagtctgcacgtggataacttgaccacttagaggccttcgttggaaacgggtttttttcatgtaaggctagacagaagaattctcagtaacttcattgtgttgtgtgtattcaactcacagagttcaacgatcctttacacagagcagacttgaaacactctttttctggaatttgcaagtggagatttcagccgctttgaggtcaatggtagaaaaggaaatatcttcctataaaaactagacagaatgattctcagaaactcctttgtgatgtgtgcgttcaactcacagagtttaacctttctttttatagagcagttaggaaacactctgtttgtaaagtctgcaagtggatattcagacctccttgaggccttcgttggaaacgggatttcttcatattatgctagacagaagaattctcagtaagttccttgtagtgtgtgtattcaactcacagagttaaacgatcctttacacagagcatacttgaaacactctttttgtggaatttgcaagtggagatttcagccgctttgaggtcaatggtagaataggaagtatctccctatagaaactagacagaatgattctcagaaactcctttgtgatgtgtgcgttcaactcacagagtttaacctttcttttcatagagcagttaggaaacactctgtttttatagtctgcaagtggatattcagacatctttgaggccttcgttggaaaccgtgatttcttcatattctgctatacagaagaattctcagaaatttccttctgttgtgtgttttcaactcacacagttgaacgatgctttacacagagtagacttgaaacactctttttgtggaatttgcaagtggagatttcagccgctttgaggtcaatggtagaaaaggaaatgtcttcgtataaaaactagacagaatcattctcagaaactgctctgcgatgtgtgcgttcaactctcagagtttaacttttcttttcattcagcagtttggaaacactctatttgtaaagtctgcacgtggataatttgaccacttagaggccttcgttggaaacgggtttttttcatgtaaggctagacagaagaattcccactaacttccttgtgttgtgtacattcaactcacagagttgaacgttcccttagacagagcagatttgaaacactctttttgtgcaattggcaagtggagatttcaagcgctttaaggtcaatggcagaaaaggaaatatcttcgtttcaaaactagacagaatcattcccacaaactgcgttgtgatgtgttcgttcaactcacagagtttaacctttcttttcatagagcagttaggaaacagtctgtttgtcaattctgtaagtggatattctgacatcttgtggcattcgttggaaacgggatttcttcatattctgctagacagaagaattctcagtaacttccttgtgttgtgtgtgttcaactcacagagttgaacgatcctttacagagagcagacttgaaacactctttttgtggaatttgcaagtggagttttcagccgctttgaggtcaatggtagaaaaggaaatatcttcgtataaagactagacagaatgattctcagaaactcctttgtgatgtgtgcgttcaactcacagtgtttaacctttcttttcatagagcagttaggaaacactctgtttgtaaagtctgcaagtggatattcagacctctttgaggccttcgttggaaacgggtttttttcatataaggctagacagaagaattctcagtaacttccttgtgttgtgtgtattcaactgacagagttgaactatcatttagagagagcagatttgaaacactgtttttgtggaagttgcaagtggagatttcaagcgctttggggccaaaggcagaaaaggaaatatcttcgtataaaaattagacagaatcattctcagaaactgctgcgtgatgtgtgcgttcaactctcagattttaacttttcttttcattcagcggtttggaaacactctgtttgtaaagtctgcacgtggaaattttgaccacttagaggccttcgttggaaacgggtttttttcatgtaaggctagacagaagaattcccagtaacttcccttgtgttgtgtgcattcaactcacagagttgaacgttcccttagacagagcagatttgaaacactctatttgtgcaatttgcaagtgtagatttcaagcgctttaaggtcaacggcagaaaaggaaatatcttcgtttcaaaactagacagaatcattcccacaaactgcgttgtgaggtgttcggtaaactcacagagtttaacctttcttttcatagagcagttaggaaacagtctgtttgtaaattctgtaagtggatattctgacatcttgtggccttcgttggaaacggggtttcttcatattctgctagacagaagaattctcagtaacttccttgtgttgtgtgtattcaactcacagagttgaacgatcctttacacagagcagacttgaaacactctttttgtggattttgcaagtggagatttcagccgctttgagttcaatggtagaataggaaatatcttcctatagaaactagacagaatgattctcagaaactcctttgtgatgtgtgcgttcaactcacagagtttaacctttcttttcatagagcagttaggaaacactctgtttgtaaagtctgcaagtggatattcagacctctttgtggccttcgttggaaacgggatttcttcatattatgctagacagaagaattctcagtaacttccttgtgttgtgtgtattcaactcacagagttgaacgatcctttacacagagcagacttgaaacactctttttgtggaatttgcaagtggagatttctgccgctttgaggtcaacggtagaaaaggaaatatcttcgtataaaaactagacagaatcattctcagaaactgctctgcgatgtgtgccttcaactctcagagtttaacttttcttttcattcagcagtttggaaacactctgtttgtaaagtctgcacgtggatattttgaccacttagaggccttcgttggaaacgggtttttttcctgtaaggctaaacagaagaattcccagtaacttccttgtgttgtgtacattcaactcacagagttgaacgttcccttagacagagcagatttgaaacactctttttgtgcaattggcaagtggagattacaagcgctttaaggtcaatggcagaaaaggaaatatcttcgtttcaaaactagacagagtgattctcagaaactcctttgtgatgtctgcgttcaactcacagagtttaacctttcttttcatagagcagttaggaaacactctgtttgtaaagtctgcaagtgcatattcagacctcctttaggccttcgttggaaacgggatttcttcatattctgctatacagaagaattctcagaaacttccttgtgttttgtgtattcaactcacagagttgaacgatcctttaaacagagcagacttgaaacactctttttgtggaatttgcaagtggagatttcagccgctttgaggtcaatggtagaaaaggaaatatcttcgtataaaaactagacagaatgattctcagaaaatcttttgtgatgtgtgcgttcaactcacagagtttaacttttcttctcatagagcagttaggaaacactctgtttgtaaagtctgcaagtggatattcagacctctttgaggccttcgttggaaacgggatttcgtcatattatgctagacagaagaattgtcagtaacttccttgtgttgtgtgtattcaactcacagagttgaacgatcctttacacagagcagacttgaaacactctttttgtggaatttgcatgtggagatttcagccgctttgaggtcaatggtagaataggaaatatcttcctatagaaactatacagaatcattctcagaaactgctgcgtgatgtgtgcgttcaactctcagagtttaacttttcttttcattcagcggtttggaaacactctgtttgtaatgtctgcacgtggatattttgaccacttagaggccttcgttggaaacgggtttttttcatgtaaggctagacagaagaattcccagtaactttccttgtgttgtgtgcattcaactcacagagttgaacgttcccttagacagagcagatttgaaacactctatttgtgcaatttgcaagtatagatttcaagcgctttaaggtcaacggcagaaaaggaaatatcttcgtttcaaaactagacagaatgattctcagaaactcctttgtgatgtgtgcgttcaactcacagagtttaacctttcttttcatagagcagttaggaaacactctgtttgtaaagtctgcaagtggatattcagacctctttgaggctttcgttggaaacgggatttctttatattctgctagacagaagaattctcagtaacttccttgtgttgtgtgtattcaactcacagagttgaacgatcctttacacagagcagacttgaaacactctttttgtggaatttgcaagtggagatttcagcggctttgaggtcaatagtagaaaaggaaatatcttcgtagaaaaactagtcagaatgattctcagaaactcctttgtgatgtgtgcgttcaactcacagagtttaacctttcttttcatagagaagttaggaaacactgtgtttgtaaagtctgcaagtggatattcagacctccttgaggccttcgttggaaacgggatttcttcatattatgctagacagaagaattcccagtaacttccttgagttgtgtgtattcaactcacagagttgaactttcatttacacagagcagatttgaaacactctttttgtggaatttgcaaatggagatttcaagccctttcaggccaaaggcagaaaaggaaatatcttcgtatgaaaactagacagagaatcattctcagtaaactgctgcgtgatgtgtgcgttcaactctcagagtttaacttttcttttcattcagcggtttggaaacactctgtttgtaaagtctgcacgtggatattttgaccacttagaggccttcgttggaaacgggtttttttcatgtaaggctagacagaagaattcccagtaacttccttgtgttgtgtgcattcaaatcacagagttgaacgttcccttagacagagcagatttgaaacactctatttgtgcaatttgcaagtgtagatctcaagcgctttaaggtcaatgggagaaaaggaaatatcttcgtttcaaaactagacagaatcattcccacaaactgcgttgtgatgtgttcgttcaactcacagagtttaacctttcttttcatagagcagttaggaaacagtctgtttgtcaattctgtaagtggatattctgacatcttgtggccttcgttggaaacaggatttcttcatattctgctagacagaagaattctcagtaacttccttgtgttgtgtttattcaactcacagagttgaatgatcctttacacagattagacttgaaacactctttttgtggaatttgcaagtggagatttctgcctctttgaggttaatggtagaaaatgaaatatcttcgtatagaaactagacagaatgattctcataaactcctttgtgatgtgtgcgttcaactcacagagtttaacctttcttttcatagagctgttaggaaacacactgtttgtaaagtctgcaagcagatattcagacctccttgaggccttcgttggaaacgggatttcttcatattctgctagacagaagaattctcagtaacttccttgtgttgtgtgtatacaactcacagagttgaactttcatttagagagagcagatttgaaacactgtttttgtggaatttgcaagtggagatttcaagcgctttggggccaaaggcagaaaaggaaatatcttcgtataaaaactagacagaaacattgtcagaaactgctgcgtgatgtgtgcgttcaactctcagagtttaacttttcttttcattcagcggtttggaaacactctgtttgtaaagtctgcacgtggatattttgaccacttagaggccttcgttggaaacgggatttattcatgtaaggctagacagaagaattcccagtaacttccttgtgttgtgtgcattcaactcacagagttgaacgttcccttagacagagcagatttgaaacagtctattggtgcaatttgcaagtgtagatttcaagcgctttaaggtcaatggcagaaaaggaaatatcttcgtttcaaaactagagagaatcattcccacaaactgcgttgtgatgtgttcgttcaactcacagagtttaacctttctgttcatagagcagttaggaaacactctgtttgtaaagtctgcaagtggatattcagacctctttgaggccttcgttggaaacgggatttcttcatattatgctacacagaaaaattctcagtaacttccttgtgttgtctgtattcaactcacagagttgaacgatcctttacacagagcatacttgaaacactctttttgaggaatctgcaagtggagatttcagccgctaaggggtcaatggtagaataggaaatatcttcctatagaaactagacagaatgattctcagaaacttcattgtgatgtgtgcgttcaactcacagagtttaacctttcttttcatacagcagttaggaaacactctgtttgtaaactctgcaagtcgatattctcacctctttgaggccttcgttggaaacgggatttcttcatactgtgctagacagaagaattctcagtaacttccttgttttgtgtgtattcaactgacagagttgaaatttcatttagagagagcagatttgtaacactgtttttgtggaatttgcaagtggagatttcaagcgcttttgggccaaaggcagaaaaggaaatatcttcgtataaaaactagacagaatcattctcagaaagtgctctgtgatgtgtgcgttcaactctcagagtttaacttttcttttcattcagcagtttggaaacactctgtttgtaaagtctgcacgtggatattttgaccacttagaggccttcgttggaaacgggtttttttcatgtaagggtagacagaagaattcccagtaacttccttgtgttgtgtacattcaactcacacagttgaacgttcccttagacagagcagatttgaaacactctttttgtgcaattggcaaatggagatttcaagcgctttaaggtcaatggcagaaaaggaaatatcttcgtttcaaaactagacagaatcattcccacaaactgcgttgtgatgtgttcgttcaactcacagagtttaacctttctgttcatagagcagttaggaaacactctgtttgtaaagtctgtaagtggatattctgacatccttgtggccttcgttggatacgggatttcttcatattctgctagacagaagaattctcagtaacttccttgtgttgtgtgtattcaactcacagagttgaacgatcctttacacagagcggacttgaaacactctttttgtggaatgtgcaagtggagatttcagccgctttgaggtcaatggtagaaaaggaaatatcttcttatacagactagacagaatgattctcagaaactcctttgtgatgtgtgcgttcaactcacagagtttaacccttcttttcatagagcagttaggaaacactctgtttgtaaagtctgcaagtggatattcagacctctttgaagcgttcgttggaaacgggttttttcatataaggctagacagaagaattctcagtaacttccttgtgttgtgtgtattcaactcacagagttgaatgatcctttacacagaacagtcttgaaaccctctttttgtggaatttgcaagtggagatttcagccgctttgaggtcaatggtagaataggaaatatcttcctatagaaactagacagaatgattctgagaaactcctttgtgatgtgtgcgttcaactcacagagttcaaccattcttttcatagagcagttgggaaacactctgtttgtaaagtctgcaagtggatattcagacttctttgaggccttcgttggaagcgggatttcttcatattctgctagacagaagaattcccagtaacttccttttgttgtgtgtgttcaactcacagagttgaactttcatttacacagagcagattggaaacactctttttgtggaatttgccagtggagatttcaagcgctttgaggccaaaggcagaaaaggaaatatcttcgtataaaaactagacagaatcattctcagaaactgctctgcgatgtgtgcgctcaactctcagagtttaacttttcttttcattcagcagtttggaaacactctgtttgtaaagtctgcacgtggataaattgactacttagaggccttcgttggaaacgggtttttttcatgtaaggctagacagaagaattcccagtaacttccttgtgttgtgtacattcaactcacagagttgaacgttccgttagacagagcagatttgaaacactctttttgtgcaattggcaaatggagatttcaagcgctttaaggtcaatggcagaaaaggaaatatcttcgtttcaaaactagacagaatcattcccagaaactgcgttgtgatgtgttcgttcaactcacagagtttaacctttctgttcatagagcacttaggaaacactctgtttgtaaagtctgtaagtggatattctgacatcttgtggccttcgttggaaacgggattttttcatattctgctagacagaagaattctcagaatcttcccttgtgttgtgtgtattcaactcacagagttgaacgatcctttacacagagcagacttgaaacactctttttgtggaatttgcatgtggagatttcagccgctttgaggtccatggtagaaaaggaaatatcttcgtataaaaactagacagaatgattctcagaaactcctttgtgatgtgtacgttcaactcacagagtttaacctttcttttcttagagcagttaggaaacactctgtttgtaaagtctgcaagtggatattcagacctctttgaggccttcgttggaaacgggtttttttcatataaggctagacagaagaattctcagcaacttccttgtgttgtgtgtattcaactgacagagttgaactttcatttagagagagcagatttgaaacactgtttttgtggaatttgcaagtggagatttcaagcgcttgggggccaaaggcagaaaaggaaatatcttcgtataaaaactagacagaatcattctcagaaactgctgcgtgatgtgtgcgttcaactctcagagtttaacttttcttttcattcagcggtttggaaacactctgtttctaaagtctgcacgtggatattttgaccacttagaggccttcgttggaaacgggtttttttcatgtaaggctagacagaagaattcccagtaacttccttgagttgtgtgcattcaactcacagagatgaacattcccttagacagagcagatttgaatcactctatttgtgtaatttacaagtgtagatttcaagcgctttaaggtcaatggcagaaaaggaaacatcttcgtttcaaaactagacagaatcattcccacaaactgcgttgtgaggtgttcgttcaactcacagagtttaacctttcttttcatagagcagttaggaaacagtctgtttgtaaattctgtaagtggatattctgacatcttgtggccttcgttggaaacgggatttcttcatattctgctagacagaagaattctcagtaacttccttgtgttgtgtgttttcaactcacaagagttgaacgatcctttacacagagcagacttgaaacactccttttgtggaatttgcaagtggagatttcagccgctttgaggtcaatggtagaataggaaatatcttcctatagaaactagacagaatcattctcagaaactcctttgtgatgtgtgtgttcaactcacagagtttaacctttcttttcatagagcagttagtaaacactctgtttataaagtctgcaagtggatattcagacccctttgaggccttcgttggaaacgggatttcttcatattattctagacagaagaattctcagtaacttccttgtgttgtgtgtattcaactgacagagttgaactttcatttagagagagcagatttgaaacacagtttttgtggaatttgcaagtggagatttcaagcgctatggggccaaaggcagaaaaggaaatatattcgtataaaaactagacagaatcattctcagaaactgctctgtgatgtgtgcgttcaactctcagagtttcacttttcttttcattcagcattttggaaatactctgtttgtaaagtctgcacgtggatattttgaccacttagaggccttcgttggaaacgggtttttttcatgtaaggctagacagaagaattcccagtaacttccttgtgttgtgtgcattccactcacagagttgaacgttcccttagacagagcagatttgaaacactctatttgtgcaatttgcaagtgtagatttcaagcgctttaaggtcaatggcagaaaaggaaatatcttcgtttcaaaactagacagaatcattcccacaaactgcgttgtgatgtgttcgttcaactcacagagtttaacctttctgttcatagagcagttaggaaacactctgtttgtaaagtctgtaagtggatattctgacatccttgtggccttcgtttgaaaagggatttcttcatattctgctagacagaagaattctcagaaacttccttgtgttgtgtgatttcaactcacagagttgaacgatcctttacacagagcagacttgaaacactctttttgtggaatttgcaagtggagatttcagccgctttgaggtcaatggtagaataggaaatatcttcctatagaaactagacagaatgattctcagaaactcctttgtgatgtgtacgttcaactcacagagtttaacctttcttttcatagagcagttaggaaacactctgtttgtaaagtctgcaagtggatattcagacctctttgaggccttcgttggaaacgggtttttttcatataaggctagacagaagaattctcagtaacttccttgtgttgtgtgtattcaactgacagagttgaactttcatttagagagagcagatttgaaacactgtttttgtggaatttgcaagtggagatttcaagcgctttgtggccaaaggtagaaaaggaaatatcttcgtataaaaactagacagaatcattctcagaaactgctgcgtaatgtgtgcgttcaactctcagagtttaacttttcttttcattcagcggtttggaaacactctgtttctaaagtctgcacgtggaaattttgaccatttagaggccttcgttggaaacgggtttttttcatgtaaggctagacagaagaattcccagtaacttccttgtgttgtgtgcattcaactcacagagttgaacgttcccttagacagaccagatttgaaacactctatttgtgcaatttgcaagtgtagatttcaagcgctttaaggtcaatggcagaaaaggaaatatcgtcgtttcaaaactagacagaatcattcccacaaactgcgttgtgatgtgttcgttcaactcacagagtttaacctttctgttcatagagcagttaggaaacactttctttgtaaagtctgtaagtggatattctgatatcttgtggccttcgttggaaacgggatttcttcatattctgctagacagaagaattctcagtaacttccttgtgttgtgtgtattcaactcacagagttgaacgatcctttacacagagcagacatgaaacactctttttgtggaatttgcaagtggagatttcagccgctttgaggtcaatggtagaaaaggaaatatcttcgtataaaaactagacagaatgattctcagaaactcctttgtgatgtgtgcgttcaactcacagagttcaacctttcttttcatagagcagttgggaaacactctgtttgtaaagtctgcaagtggatattcagacttctttgaggccttccttggaagcgggatttcttcatattcagctagacagaagaattctcagtaacttccttgtgttgtgtgtattcaactcacagagttgaacgatgctttacacagagcagacttgaaacactctttttgtggtatttgcaagtggagatttcagccgctttgaggtcaatgttagaaaaggaaatatcttcgtataaaaactagacagaatcattctcagaaactgctctgcgatgtgtgtgttcaactctcagagtttaacttttcttttcattcagcagtttggaagcactctgtttgtgaagtctgcacgtggatattttgaacacttagaggccgtctttggaaacgggtttttttcctgtaaggctagacagaagaattcccagtaacttccttgtgttgtgtgcattcaactcacagagttgaacgttccttagacagagcagatttgaaacactctattcgtgcaatttgcaagtgtagatttcaagcgctttaaggtcaatggcagaaaaggaaatatcttcgtttcaaaactagacagaatcattcccacaaactgcgctgtgatgtgttcgttcaactcacagagtttaacctttctgttcatagagcagttaggaaacactctgtttgtaaagtctgtaagtggatattctgacattttgtggccttcattggaaatgggatttcttcatattctcctagacagaagaattctcagtaacttccttgtgttgtgtgtattcaactcacagagttgaacgatcctttacacagagcagacttgtaacactctttttgtgtaatttgcaagtggagatttcagccgctttgaagtcaaaggtagaaaaggaaatatcttcctataaaaactagacagaatgattctcagaaactcctttgtgatgtgtgcgttcaactcacagagtttaacctttcttttcatagagcagttaggaaacactctgtttgtaaagtctgcaagtggatattcagacgtctttgaggccttcgttggaaacgggtttttttcatataaggctagacagaagaactcccagtaacttccttgtgttgtgtgtgttcaactcacagagttgaactttcctttacacagagcagatttgaaacactctttttgtggaatttgcaaatggagatttcagccgcgttgaggtcaatggtagaaaaggaaatatcttcgtttcaaaactagacagaatcattctcagaaactgctctgcgatgtgtgctttcaactctcagagtttaacttttcttttcattcagcagtttggaaacactctgtttgtaaagtctgcacgtggatattttgaccacttagaggccttcgttggaaacgggtttttttcctgtaaggctagacagaagaattcccagtaacttccttgtgttgtgtacattcaactcacagagttcaacgttcccttagacagagcagatttgaaacactctttttgtgcaattggcaagtggtgatttcagccgctttgaggtcaatggtagaaaaggaaatatcttcgtataaaaactagacagaatcattcccacaaactgcgttgtgatgtgttcgttcaactcacagagtttaacctttcttttcatagagcagttaggaaacagtctgtttgtaaattttgtaagtggatattctgacatcttgtgcccttcgttggaaacgggatttcttcatattctgctagacagaagaattctcagaatcttccttgtgttgtgtgtattcaactcacacagttgaacgatactttacacagagcagacttgaaacgctctttttgtggaatttgcaagtggagatttcagccgcgttgaggtcaatggtagaaaaggaaatatcttcgtataaaaactagacagaatgattctcagaaactcctttgtgatgtgtgcgttcaactcacacagtttaacctttcttttcatagagcagttaggaaacactctgtttgtaaagtctgcaggtggatattcagacctccttgaggcattcgttggaaacgggatttcttcatattatgctagacagaagaattcccagtaacttccttgtgttgtgtgtgttcaactcacagagttaaactttcatttacccagagcagatttgaaacactctttttgtggaatttgcaagtggagatttcaagcgctttgaggccaaaggcagaaaaggaaatatcttcgtttcaaaactagacagaatcattctcagaaactgctgcgtgatgtgtgcgttcaactctcagagtttaacttttcttttcattcagcggtttggaaacattctgtttgtaaagtctgcacgtggatattttgaccacttagaggccttctttggaaacgggtttttttcatgtaaggctagacagaagaattcccagtaacttccatgtgttgtgtgcattcaactcacagaattgaacgttcccttagacagagcagatttgaaacactctatttctgcaatttgcaagtgtagatttcaagcgctttaaggtcaatggcagaaaaggaaatatcttcgtttcaaaactagacagaatcattcccacaaactgcgttgtgatgtgttcgttcaactcacagggtttaacctttcttttcatagagcagttaggaaacagtctgtttgtcatttctgtaagtggatattctgacatcttgtggccttagttggaaacgggatttcttcatattctgctagacagaataattctcagtaacttccttgtgttgtgtgtattcaactcacagagttgaaggatcctttacagagagcaggcttgaaacactgtttttgtcgaatttgcaagtggagatttcagccgctttgaggtcaatggtagaataggaaatatcttcttatagaaactagacagaatgattctgagaaagtcctttgtgatgtgtgcgttcaactcacagagtttaaccttttttttcatagagcagttaggaaacactctgtttgtaaagtctgcaagtggatattcagacctctttgaggccttcgttggaaatgggatttcttcatattatgctagacagaagaattcccagtaacttccttgtgttgtgtgtgttcaactcacagagttgaactttcatttacacagagcagatttgaaactctctttttgtggaatttgcaagtggagatttcaagcgctttgaggccaaaggcagaaaaggaaatatcttcgtttcaaaactagacagaatcattatcagaaactgctgcgtgatgtgtgcgttcaactctcagagtttaacttttcttttcattcagcggtttggaaacactctgtttgtaaagtctgcacgtggatattttgaccacttagaggccttcgttggaaacgggtttttttcatgtaacgctagacagaagaattcccaggaacttccttgtgttgtgtacattcaactcacagagttgaacgttcccttagacagagcagatttgaaacactctttttgtgcaattggcaagtggtgatttcagccgctttgaggtcaatggtagaaaaggaaatatcttcgtataaaaactagacagaatgattctcagaaactcctttgagatgtgtgcgttcaactcatagagtttaacttttcttttcatagagcagttaggaaacactctgtttgtaaagtctgcaggtggatattcagacctctttgaggccttcgttggaaacgggatttcttcatattctgctagacagaagaattctcaataacttccttgtgttgtgtgtattcaactcacagagttgaacgatcctttacacagagcagacttgaaacactctttttgtggaatttgcaagtggagatttcagccgctatgaggtcaatagtagaaaaggaaatatcttcgtagaaaaactagacagaatgattctcagaaactcctttgtgatgtgtgcgttcaactcacagagtttaacctttcttttcatagagcagttaggaaacactctgtttgtaaagtctgcaagtggatattcagacatcctagaggctttcgttggaaacgggatttcttcatattctgctatacagaagaattcccagtaacttccttgtgttgtgtgtgttcaactcacagagttgaactttcatttacccagagcagatttgaaacactctttttgtggaatttgcaagtggagatttcaagcgctttgaggccaaatgcagaaaaggaaatatcttcgtttcaaaactagacagaatccttctcagaaactgctgcgtgatgtgtgcgttcaactctcagagtttaacttttcttttcattcagcggtttggaaacactctgtttgtaatgtctgcacgtggataatttgaccacttagaggccttcgttggaaacgggttttttgcacgtaaggctaggcagaagaattcccagtaacttcccttgtgttgggtgcattaaactcacagagttgaacgttcccttagacagagcagatttgaaacactctatttgtgcaatttgcaagtgtagatttcaagcgctttaaggtcaatggcagaaaaggaaatatcttcgtttcaaaactagacagaacgtttctcagaaactcctttgtgatgtgtgcgttcaactcacagagtttaacctttcttttcatagagcagttaggaaacactctgtttgtaaagtctgcaagtggatattcagacctccttgaggccttcgttggaaacgggatttcttcatattctgctagacagaagaattctcagtaacttccttgtgttgtgtttattcaactcacagagttgaatgatcctttacacagagcagacttgaaacactctttttattgaatttgcaagtggagatttcagccgctttgaggtcaatggtagaaaagtaaatatcttcgtataaagactagacagaatgattctcagaaactcctttgtgatgtgtgcgttcaactcacagagtttaacgtttcttttcatagagcagttaggaaacactctgtttgtaaagtctgcaagtggatattcagacatctttgaggccttcgttggaaacgggatttcttcatgttctgctagacagaagaattcccagtaacttccttgtgttgtgtgtgttcaactcacagagttgaactttcatttacacagagcagatttgaaacactctttttgtggaatttgcaagaggagatttcaagcgctttgaggccaaagacagaaaaggaaatatcttcgtataaaaactagacagaatcattctcagaaactgctgcgtgatgtgtgcgttcaactctcagagtttaacttttcttttcattcagcggtttggaaacactctgtttgtaaagtctgcacgtggatattttgaccacttagaggccttcgttcgaaacgggattttttcatgtaaggctagacagaagaattcccagtaacttccttgtgttgtgtacattcaactcacagagttgaacgttcccttagacagagcagatttgaaacactctttttgtgcaattggcaagtggagatttcaagcgctttaagttcaatggcagaaaaggaaatatcttcgtttcaaaactagacagaatcattcccacaaactgcgttgtgaggtgttcgttcaactcacagagtttaacctttcttttcatagagcagttaggaaacagtctgtttgtaaattctgtaagtggatattctgacatcttgtggccttcgttggaaacgggatttcttcatattctgctagacagaagaattctcagtaacttccttctgttgtgtttattcaactcacagagttgaatgatcctttacacagagcagacttgaaacactctttttgtggaatttgcaagtggaggtttcagccgctttgaggtcaatggtagaaaagtaaatatcttcgtataaagactagacagaatgattctcagaaactcctttgtgatgtgtgcgttcaactcacagagttcaacctttcttttcatagagcagttgggaaacactctgtttgtaatgtctgcaagtggatattcagacttctttgaggctttcgttggaagcgggatttcttcatattctgctagacagaagaattctcagtaacttccttgtgttgtgtgtattcaactcacagagttgaacgatcctttacacagagcagacttgaaacactctttttgtggaatttgcaagtggagatttcaagcgctttggggccaaaggcagaaaaggaaatatcttcgtataaaaactagacagaatcattctcagaaactgctgtgtgatgtgtgcgttcaactctcagagtttaacttttcttttcattcagcggtttggaaacactctgtttgtaaagtctgcacgtggatattttgaccacttagaggccttcgttggaaacgggtttttttcatgtaaggctagacagaagaattcccagtaacttccttgtgttgtgtgcattcaactcacagagatgaacgttcccttagacagagcagatttgaaacactctatttgtgcaatttgcaagtgtagttttcaagctctttaaggtcaacggcagaaaaggaaatatcttggtttcaaaactagacagaatcattgtcacaaactgcgttgtgatgtgttcgttcaactcacagagtttaacctttcttttcatagagcagttaggaaacactctgtttgtaaagtctgcaagtggatattcagacatctttgaggctttctttggaaacgggatttcttcatattcttctagacagaagaattctcagtaactttccttgtgttgtgtgcattcaactcacagagttgaacgatcctttacacagagcagacttgagacactctttttgtggaatttgcaagtggagatttcagccgctttgaggtcaatggtagaaaaggaaatatcttcgtataaaaactagacagaatgattctcataaactcctttgtgatgtgtgcgttcaactcacagagtttaacttttcttttcatagagcagttaggaaacactctgtttgtaaagtctgcaagtggatattcagacctccttgaggccattcgttggaaacgggatttcttcatattctgctagacagaagaattcccagtaacttccttgtgttgtgtgtgttcaactcacagagttgaactttcatttacacagagcagatttgaaacactctttttgtggaatttgcaagtagagatttcaagcgctttgaggccaaaggcagaaaaggaaatgtattcgtataaaaactagacagaatcattctcagaaactgctctgcgatgtgtgcgttcaactctcagagtttaacttttcttttcattcagcagtttggaaacactctgtttgtaaagtctgcaagtggatattcagacctctttgaggccttcgttggaaacgggttttttacatataaggctaaacagaagaattcccagtaacttccttgtgttgtgtgcattcaactcacagagttgaacgttcccttagacagagcagatttgaaacactctatttgtgcaatttgcaagtgtagatttcaagcgctttaaggtcaatgggagaaaaggaaatatcttcgtttcaaaactagacagaatcattcccacaaactgcgttgtgatgtgttcgttcaacttacagagtttaacatttctgttcatagagcagttaggaaacactctgtttgtaaagtctgtaagtggatattcagacatcttgtggccttcgttggaaacgggatttcttcctattctgctagacagaagaattctcagtaacttccttgtgttgtgtgtactcaactcacagagttgaaggatcctttacagagagcaggcttgaaacactctttttgtcgaatttgcaagtggagatttcagccgctttgaggtcaatggtagaataggaaatatcttcttatagaaactagacagaatgattatcagaaaatcctttgtgatgtgtgcgttcaactcacagagtttaacttttcttttcatagagcagttaggaaacactctgtttgtaaagtctgcaagtggatattcagacctctttgaggccttcgttggaaacgggatttcttcatattatgctagacagaagaattctcagtaacttccttgtgttgtgtgtattcaactgacagagttgaactttcatttagagagagcagatttgaaacactgtttttgtggaatttgcaagtggagatttcaagcgctttggggccaaaggcagaaaaggaaatatcttggtataaaaactagacagaatcattctcagaaaatgctctgcgatgtgtgcgttcaactctcagagtttaacttttcttttcattcagcagtttggaaacactctgtttgtaaagtctgcacgtggataatttgatcacttagaggccttcgttggaaacggctttttttcatgtaaggctagacagaagaattcccagtaacttccttgtgttgtgtgcattcaactcacagagttgaacgttcccttagacagagcagatttgaaacactctatttgtccaatttgcaagtgtagatttcaagcgctttaaggtcaacggcagaaaaggaaatatcttcgtttcaaaactagacagaatcattcccacaaactgcgttgtgatgtgttcgttcaactcacagagtttaacctttcttttcatagagcagttaggaaacagtctgtttgtaaattctgtaagtggatattctgacatcttgtggccttggttggaaacgggatttcttcatattctgctagacagaagaattctcagtaacttccttgtgttgtgtgtattcaactcacagagttgaactatcctttacacagagcagacttgtaacactctttttgtggaatttgcaagtggagatttcagccgctttgaagtcaaagtagaaaaggaaatatcttcctataaaaactagacagaatgattctcataaactcctttgtgatgtgtgcgtccaactcacagagtttaacctttcttttcatagagcagttaggaaacactctgtttgtaaagtctgcaagtggatattcagacctccttgaggccttcgttggaaacgggatttcttcatattctgctagacagaagaattctcagtaacttccttgtgttgtgtgtattcaactgacagagttgaactttcatttagagagagcagatttgaaacactgtttttgtggaatttgcaagtggatatttcaagcgctttggggccaaaggcagaaaacgaaatatcttcgtataaaaactagacagaatcattctcagaaactgctgcgtgatgtgtgcgttcaactctcagagtttaacttttcttttcattcagcggtttggaaacactctgtttgtaaagtctgcacgtggacattttgaccacttagaggtcttctttggaaacgggtttttttcatgtaaggctagacagaagaattcccagtaacttccttgtgttgtgtgcattcaactcacagagttgaacgttcccttagacagagcagatttgaaacactctatttgtgcaatttgcaagtgtagatttcaagcgctttaaggtcaatggcagaaaaggaaatatcttagtttcaaaactagacagaatcattctcacaaactgcgttgtgatgtgttcgttcaactcacagagtttaacctttcttttcatagagcagttaggaaacagtctgtttgtcaattctgtaagtggatattctgacatcttgtggccttcgttggaaacgggatttcttcatattctgctagacagaagaattctcagtaacttccttgtgttgtgtgtattcaactcacagagttgaacgatcctttatagagagcagactttaaacactctttttgtggaatttgcaagtggagatttcagccgctttgaggtcaatggtagaaaaggaaatatcttcgtataaagactagacagaatgattctcagaaactcctttgtgatgtgtgcgttcaactcacagagtttaacctttcttttcatagagcagttaggaaacactctgtttgttaagtctgcaagtggatattcagacctctttgaggccttcgttggaaacgggttttcttcatattatgctagacagaagaattcccaagtaacttccatgtgttgtgtgtgttcaactcacagagttgaactttcatttacacagagtagatttgaaacactctttttgtggaatttgcaaatggagatttcaaactctttgaggccaaaggcagaaaaggaaatatcttcgtataaaaactagacagaaatcattctcagaaactgctctgcgatgtgtgcgttcaactctcagagtttaacttttcttttcattcagcagtttggaaacactctgtttgtaaagtctgcacgtggataacttgaccacttagaggacttcgttggaaacgggtttttttcctgtaaggctagacagaagaattcccagtaacttccttgtgttgtgtacattcaactcacagagttgaacgttcccttagacagagcagatttgaaacactctttttgtgcaattggcaaatggagatttcaagcgctttaagttcaatggcagaaaaggaaatatcttcgtttcaaaactagacagaaatcattcccacaaactgcgttgtgatgtgttcgttcaactcacagagtttaacctttcttttcatagagcagttaggaaacagtctgtttgtcaattctgtaagtggatattctgacatcttgtggccttcgttggaaacgggatttcttcatattctgctagacagaagaattctcagtaacttccttgtgttgtgtgtattcaactcacagagttgaacgatcctttacacagagcagacttgaaacactctttttgtggaatttgcaagtggagatttcagccgatttgacgtcaatggtagaataggaaatatcttcctatagaaactagacagaatgattctcagaaactcctttgtgatgtgtgtgttcaactcacagagtttaacctttctgttcatagagcagttaggaaacactctgtttgtaaagtctgcaagtggatattcagacctccttgaggccttcgttggaaacgggatttcttcatattctgctagacagaagaattcccagtaacttccttgtgttgtgtgtgttcaactcacagagttgaactttcatttacacagagcagatttgaaacactctttttgtggaatttgcaaatggagatttcaagcgctttgaggccaaaggcagaaaaggaagtatcttcgtataaaaactagacagaatcattctcagaaactgctctgcgatgtgtgcgttcaactctcagagtttaactttgcttttcattcagcagtttggaaacactctgtttgtaaagtctgcacgtggataatttgaccacttagaggccttcgttggaaacgggtttttttcatgtaaggctagacagaagaattcccagtaacttccttgtgttgtgtgcattcaactcacggagttgaacgttcccttagagcagatttgaaacactctatttgtgcaatttgcaagtgtagatttcaagcgctttaaggtcaatggcagaaaaggaaatatcttcgtttcaaaactagacagaatcattcccacaaactgcgttgtgatgtgttcgttcaactcacagagtttaacctttctgttcatagagcagttaggaaacactctgtttgtaaagtctgcaagtggatattcagacctcctagaggccttcgttggaaacgggatttctccatattctgctagacagaataattctcagtaacttccttgtgttgtgtgtattcaactcacagagttgaacgatcctttacacagagcagacttgaaacactctttttgtggaatttgcaagtggagatttcagccgctttgaggtcaatggtagaaaaggaaactatcttcgtataaagacaagacagaatgattctgagaaactcctttgtgatgtgtgcgttcaactcacagagtttaacctttcttttcatagagcagttaggaaacactctgtttgtaaagtctgcaagtggatattcagacctccttgaggccttcgttggaaacgggatttcttcctattatgctagacagaagaattctcagtaacttccttgtgttgtgtgtattcaactcacagagttgaatgatcctttacacagagcagacttgaaacactctttttgtggaatttgcaagtggagatttcagccgttttgagttcaatggtagaataggaaatatcttcctatagaaactagacagaatcattctcagaaactgctctgcgatgtgtgcgttcaactctcagagtttaacttttcttttcattcagcagtttggaaacactctgtttgtaaagtctgcacgtggataatttgaccacttagagaccttcgttggaaacgggtttttttcatgtaaggctagacagaagaattctcagtaacttccttgtgttgtgtgtattcaactcacagagttgaacgatcctttacacagagcagacttgaaacactctttttgtggaatttccaagtggagatttcagccgctatgtggtcaatggtagaatagcaaatatcttcctatagaaactagacagaatgattctcagaaactcctttgtgatgtgtgcgttcaactcacagattttaaccgttcttttcatagagcagttaggaaacactctgtttgtaaagtctgcaagtggatattcagacctctttgaggccttcgttggaaatgggatttcttcatattctgctagacagaagaattctcagtaacttccttgtgttgtgtgcattcaactcacagagttgaacgatcctttacacagagcagacttgaaacactcttttcgtggaatttgcaagtggagatttctgccgctttgaggtcaattgtagaataggaaatatcttcctgtagaaactagacagaatgattctcagaaactcctttgtgatgtgtgcgttcaactcacagactttaacctttcttttcatagagcagttaggaaacactctgtttgtaaagtctgcaagtggatattcagacctctttgaggccttcgttggaaacgggtttttttcatataaggctagacagaaagaattcccagtaacttccttgtgttgtgtgtgttcaactcacagagttgagctttcatttacacagagcagatttgaaacactctttttgtggaatttgcaagtggagatttcaagcgctttgaggccaaaggcagaaaaggaaatatcttcgtataaaaactagacagaatcattctcagaaactgctctgcgatgtgtgcgttcaactctcagagtttaacttttgttttcattcagcagtttggaaacactctgtttgtaaagtctgcacgtggataatttgaccacttagaggccttcgttggaaacgggtttttttcatgtaaggctagacagaagaattctcagtaacttccttgtgttgtgtgtattcaactgacagagttgaactttcatttagagagagcagatttgaaacactgtttttgtggaatttgcaattggagatttcaagcactttggggccaaaggcagaaaaggaaatatcttcgtttcaaaactagacagaatcattcccacaaactgcgttgtgatgtgtttgttcaactcacacagtttaacctttctgttcatagagcagttaggaaacactctgtttgtaaagtctgcaagtggatattcagacctccgtgaggccttcgttggaaacgggatttcttcatattctgctagacagaagaattctcagtaacttccttgtgttgtgtgtattcaactcacagagttgaacgatcctttacacagagcagacttgaaacactctttttgtggaatttgcaagtgcagatttcagccgctttgaggtcaatggtagaataggaaatatcttcctatagaaactagacagaatgattctcagaaactcctttgtgatgtgtgcgttcaactcacagagtttaacctttcttttcatagagcagttaggaaacactctgtttgtaaagtctgtaagtggatattcagacatccttgaggctttcgttggaaacgggatttcttcatattctgctagaaagaagaattctcagtaacttccttgtgttgtgtgtattcaactcacagagttgaatgatcctttacacagaacagtcttgaaacactctttttgtggaatttgcaagtggagatttcagccgctttgaggtcaacggtagaataggaaatatcttcctatagaaactagacagaatcattctcagaaactgctctgcgatgtgtgcgttcaactctcagagtttaacttttcttttcattcagcagtttggaaacactctgtttgtaaagtctgcacgtggatattttgaccacttagaggctcttcgttggaaacgggtttttttcctgtaaggctagacagtagaattcccagtaacttccttgtgttgtgtacattcaactcacagagttgaacgttcccttagacagagcagatgtgaaacactctttttgtgcaattggcaagtggagatttcaagcgctttaaggtcaatggcagaaaaggaaatatcttcgtttcaaaactagacagaatcattcccacaaactgcgttgtgatgtgttcgttcaactcaccagagtttaacctttcttttcatagagcagttaggaaacactctgtttgtaaattctgtaagtggatattctgacatcttgtggccttcgttggaaacgggatttcttcatattctgctagacagaagaattctcggaatcttccttgtgttgtgtgtattcaactcacagaattgaacgatggtttacacagagcagatttgaaacactctttttgtggaatttgcaagtggagatttcagccgctttgaggtcaatggtagaaaaggaaatatcttcgtataaaaactagacagaatgattctcagaaacttctttgtgatgtgtgcgttccactcacagagtttaacctttcttttcatagagcagttaggaaacactctgtttgtaaactctgcaagtggatattcagacctctttgaggccttcgttgcaaacgggatttcttcatattatgcctgagagaagaattctcagtaacttccttgtgttgtgtgtattcaactgacagagttgaactttcatttagagagagcagatttgaaacactgtttttgtggaatttgcaagtggagatttcaagcgctatggggccaaaggcagaaaaggaaatatctttgtataaaaactagacagaatcattctcagaaactgctctgcgatgtgtgtgttcaactctcacagtttaacttttcttttcattcagcagtttggaaacactctgtttgtaaagtctgcacgtggataatttgaccacttagaggccttcgttggaaacgggtttttttcatgtaaggctagacagaagaattcccagtaacttccttgtgttgtgtacattcaactcacagagttgaacgttcccttagacagagcagatttgaaacactctttttgtgaaattggcaagtggtgatttcaagcgctttaaggtcaatggcagaaaaggaaatatcttcgtttcaaaactagacagaatcattcccacaaactgcgttgtgaggtgttcgttcaactcacagagtttaacctttcttttcatagagcagttaggaaacagtctgtttgtaaattctgtaagtggatattctgacatcttgtggccttagttggaaacgggatttcttcatattctgctagacagaagaattctcagtaactttccttgtgttgtgtgtattcaactcacagagttgaacgatcctttacacagagcagacttgtaacactctttttgtggaattcgcaagtggagatttcagcagctttgaagtcaaaggtagaaaaggaaatatcttcctataaaaactagacagaatgattctcagaaacttctttgtgatgtgtgcgttcaactcacagaatttaacctttcttttcatagagcagttaggaaacactctgtttgtaaactctgcaagtggatattcagacctgtttgaggccttcgttggaaacgggatttcttcatactatgctagacagaagaattctcagtaacttccttgtgttgtgtgtattcaactcacagagttgaacgatcctttacacagagcagacttgtaacactctttttgtggaatttgcaagtggagatttcagccgctttgacgtcaaaggtagaaaaggaaatatcttcctatacaaactagacagaatcattctcagaaactgatctgtgatgtttgcgttcaactctcagagtttaacttttcttttcattcagcagtttggaaacactctgtttgtgaagtctgcacgtggataatttgaccactttgaggccttcgttggaaacgggtttttttcctgtaaggctagacagaagaattctcagaaacttccttgtgttgtgtgttttcaaatcacagagttgaacgatgctttacacagagtagacttgaaacactctttttgtgtaatttgcaagtggagatttcagccgctttgaggtcaatggtagaaaaggaaatatcttcgtataaaaattagacagaatgattctcagaaactcctttgtgatgtgtgcgttcaactcacagagtttaacctttcttttcatagagtagttaggaaacactctgtttgtaaagtctgcaagtggatattcagacctccttgagaccttcgttggaaacgggatttcttcatattatgctagacagaagaattctcagtaacttccttgtgttgtgtgtattcaactcacagagttgaacgatcctttacacagagcagacttgaaacactctttttgtggaatttgcaagtggagatttcagccgctttgaggtcaacggtagaataggaaatatcttcctatagaaactagacagagtgattctcataaactcctttgtgatgtgtgcgttcaactcacagagtttaacctttcttttcatagagcagttaggaaacactctgtttgtaaagtctgcaagtggatattcagacctccttgaggccttctttggaaacgggatttcttcatattctgatagacagaagaattctcagaaacttccttgtgttgtgtgttttcaactcacagagatgaacgatcctttacacagagcagacttgaaacactccttttgtggaatttgcaagtggagatttcagccgctttgagttcaatggtagaataggaaatatcttcctatagaaagtagacagaatgattctcagaaactcctttgtgatgtgtacgttcaactcacagagtttaacctttcttttcatagagcagttaggaaacactctgtttgtaaagtctgcatgtggatattgagacctctttgaggccttcgttggaaacgggtttttttcatataaggctagacagaagaattcccagtaacttccttgtgttgtgtgtgttcaacttacagagttgaactttcatttacacagagcagatttgaaacactctttttgtggaatttgtaagtggagatttcaagcgctttgaggccaaaggcagaaaaggaaatatcttcgtataaaaactagacagaatcattctcagaaactgctgtgtgatgtgtgcgttcaactctcagagtttaacttttcttttcattcagcggtttggaaacactctgtttgtaaagtctgcacgtggatattttgaccacttagaggccttcgttggaaacgggtttttttcatgtaaggctagacagaagaattcccagtaacttccttgtgttgtgtgcattcaactcacagagttgaacgttcccttagacacagcagatttgaaacactctatttgtgcaatttgcaagtgtagatttcaagcgctttaaggtcaatggcagaaaaggaaatatcttcgtttcaatactagacagaatcattcccacaaactgcgttgtgatgtgttcgttcaactcacagagtttaacctttcttttcatagagcagttaggaaacactctgttggtaaattctgtaagtggatattctgacatccttgtggccttcagtggaaacgggatttcttcatattctgctagacagaagaattctcagaatcttccttgtgttgtgtgtattcaactcacacagttgaacgattgtttacacagagcagatttgaaacactctttctctggaatttgcaagtggagatttcagccgctttgaggtccatggtagaaaaggaaatatcttcgtataacaactagacagaatgattctcagaaactcctttgtgatgtgtgcgttcaactcacagagtttaacctttctattcatagagcagttaggaaacactctgtttgtaaagtctgcaagtggatattcagacctctttgaggccttcgttggaaacgggtttttttcatataaggctagacagaagaattcccagtaacttccttgtgttgtgtgtgttcaactcacagagttgaactttgatttacacagagcagatttgaaacactctttttgtggactttgcaagtggagatttcaagcgctttgaggccaaaggcagaaaaggaaatatcttcgtttcaaaactagacagaatcattctcagaaactgctctgcgatgtgtgcgttcaactctcagagtttaacttttcttttcattcagcagtttggaaacactctgtttgtaaagtctgcacgtggatattttgaccacttagaggccttcgttggaaacgggttttttcctgtaaggctagacagaagaattcccagtaacttccttgtgttgtgtacattcaactcacagagttgaacgttcccttagacagagcagatttgaaacactctatttgtgcaattggcaagtggagatttcaagcgctttaaggtcaatggcagaaaaggaaatatcttcgtttcaaaactagacagaatcattcccacaaactgcgttgtgatgtgttcgttcaactcacagagtttaacctttcttttcatagagcagttaggaaacactctgttggtaaattctgtaagtggatattctgacatcttgtggccttcgttggaaacaggatttcttcatattctgctacacagaagaattctcagtaacttccttgtgttgtgtgtattcaactcacagagttgaacgatcctttacacagagcagacttggaacactctttttgtggaatttgcaagtggagatttcagccgctttgaggtccatggtagaaaaggaaatatcttcgtataaaaactagacagaatgattctcagaaactcctttgtgatgtgtgcgttcaactcacagagtctaacctttcttttcatagagcagttaggaaacactctgtttgtaaagtctgcaagtggatattcagacatctttgaggctttcgttggaaacgggatttcttcatattctgctagacagaagaattctcagtaacttccttgtgttgtgcgtattcaactgacagagttgaactttcatttagagagagcagatttgaaacactgtttttgtggaatttgcaagtggagatttcaagcgctttggggccaaaggcagaaaacgaaatatcttcgtataaaaactagacagaaatcattctcagaaaactgctgcgtgatgtgtgcgttcaactctcagagtttaacttttcttttcattcagcggtttggaaacactctgtttgtaaagtctgcacgtggatattttgaccacttagaggccttcgttggaaacgggtttttttcatgtaaggctagacagaagaattcccagtaacttccttgtgttgtgtacattcaactcacagagttgaacgttcccttagacagagcagatttgaaacactctttttgtgcaattggcaagtggagatttcaagcgctttgaggtcaatggcagaaaaggaaatatcttcgtttcaaaactagacagaatcattcccaaaaattgcgttgtgatgtgttcgttaaactcacagagtttaacctttctgttcatagagcagttaggaaacactctgtttgtaaagtctgtaagtggaaattctgacatcttgtggccttcgttggaaacgggatttcttcatattatgctagacagaagaattctcagaaacttccttgtgttgtgtgttttcaactcacagagttgaacgatcctttacacagagcagacttgaaacactccttttgtggaatttgcaagtggagatttcagccgctttgaggtcaatggtagaaaaggaaatatcttcgtataaaaactagacagaatgattctcataatctcctttgtgatgtgtccgttcaactcacagagtttaaccttccttttcatagagcagttaggaaacactctgtttgtaaagtctgcaagtggatattcagacctccttgaggccttcgttggaaacgggatttcttcatattctgctagacagaagaattcccagtaacttccttgagttgtgtgtggtcaactcacagagttgaactttcatttacacagagcagatttgaaacactctttttgtataatttgcaaatggagatttcaagcgctttgaggccaaaggcagaaaaggaaatatcttcttataaaaactagacagaatcattctcagaaactgctctgcgatgtgtgcgttcaactctcagagtttaacttttcttttcattcagcagtttggaaacactctgtttgtaaagtctgcacgtggatattttgaccacttagaggccttcgttggaaacgagtattttttcctgtaaggctagacagaagaattcccagtaacttccttgtgttgtgtacattcaactcacagagttgaacgttcccttagacagagcagatttgaaagactctttttctgcaattggcaaatggagatttcaagcgctttaaggtcaatggcagaaaaggaaatatcttcgtttcaaaactagacagaatgattctcataaactcctttgtgatgtgtgcgttcaactcacagagtttaacttttcttttcatagagcagttaggaaacactctgtttgtaatgtctgcaagtggatattcagacctccttgaggccttcgttggaaacgggatttcttcatattctgctagacagaagaattctcagtaacatccttgtgttgtgtgtattcaactcacagagttgaacgatcctttacacagagcagacttgaaacactctttttgttgaatttgcaagtggagatttcagccgctttgaggtcaatggtagaaaaggaaatatcttcgtataaaaactagacagaatgattctcagaaactcctttgtgatgtgtgcgttcatctcacagagtttaacttttcttttcatagagccgttaggaaacactctgtttgtaaagtctgcaagtggatattcagacctctttgaggccttcgttggaaacgggatttcttcatattatgctagacagaagaattcccagtaacttccatgtgttgtgtgtgttcaactcacagagttgaactttcatttacacagagcagatttgaaacactctttttgtggaatttgcaaatggagatttcaagcggtttgaggccaaaggcagaaaaggaaatatcttcgtataaaaactagacagaatcattctcagaaactgctgcgtgatgtgtgcgttcaactctcagagtttaacttttcttttcattcagcggtttggaaacactctgtttgtaaagtctgcacgtggatattttgaccacttagaggccttcgttggaaacgggttttttcatgtaaggctagacagaagaattcccagtaacttccttgtgttgtgtgcattcaactcacagagttgaacgttcccttagacagagcagatttgaaacactctatttgtgcaatttccaagtgtagatttcaagcgctttaaggtcaacggcagaaaaggaaatatcttcgtttcaaaactagacagaatcattcccacaaactgcgttgtgatgtgttcgttcaactcacagagtttaacctttgtgttcatagagcagttaggaaacactctgtttgtaaagtctgtaagtggatatactgacatcttgtggccttcgttggaaaccggatttcttcatattctgctagacagaagaattctcagtaacttccttgtgttgtgtgtattaaactcacagggttgaacgatcctttaaacagagcagacttgaaacactctttttgtggaatttgcaagtggagatttcagccgctttgaggtcaatggtagaaaaggaaagtatcttcgtataaagactagacagaatgattctcagaaactcctttgtgatgtgtgtgttcaactcacagagtttaacctttcttttcatagagcagttaggaaacactctgtttgtaaagtctgcaagtggatattcagacctctttgaggccttcgttggaaacgggtttttttcatatgaggctagacagaagaattcccagtaacttccttgtgttgtgtgtgttcaactcacagagttgaactttcatttacacagagcagattggaaacactctttttgtgaaatttgcaagtggagatttcaagtgctttgaggccaaaggcagaaaaggaaatatcttcgtataaaaactagacagaatcattctcagaaactgctctgcgatgtgtgctgttcaactctcagagtttaacttttcttttcattcagcagtttggaaacactctgtttgtaaagtctgcacgtggatattttgaccacttagaggccttcgttggaaacgggtttttttcctgtaaggctagacagaagaattcccagtaacttccttgtgttgtgtacattcaactcacagagttgaacgttcccttagacagagcagatttgaaacactctttttgtgcaattggcaagtggtgatttcagccgctttgaggtcaatggtagaaaaggaaatatcttcgtataaaaactagacagaatcattcccacaaactgcgttgtgatgtgttcgttcaactcacagagtttaacctttgtgttcttagagcagataggaaacactctgtttgtaaagtctgtaagtggatattctgacatcctgtggccttcgttggaaacgggatttcttcatattctgctagacagaagaattctcagtaacttccttatgttgtgtgtattcaactcacagagttgaactatcctttacacagagcagacttgaaacactctttttgtggaatttgcaagtggagatttcagccgctttgaggtcaatggtagaataggaaatatcttcctatagaaactagacagaatgattctcagaaactcctttgtgatgtgtgcgttcaactcacagagtttaacctttcttttcatagagcagttaggaatcactctgcttgtaaagtctgcaagtggatattcagccctctttgaggccttcgttggaaacgggtttttttcatataaggctagacagaagaattcccagtaacttccttgtgttgtgtgtgttcaactcacagagttgaactttcatttaaacagagcagatttgaaacactctttttgtggaatttgcaagtggagatttcaagcgctttgaggccaaaggtagaaaaggaaatatcttcgtttcaaaactagacagaatcattctcagtaaactgctctgcgatgtgtgcgttcaactctcagagtttaactttgcttttcattcagcagtttggaaacactctgtttgtaaagtctgcacgtggataatttgaccacttagaggccttcgttggaaacgggtttttttcatgtaaggctagacagaagaattcccagtaacttccttgtgttgtgtgcattcaactcacagagttgaacgttcccttagacagagcagatttgaaactctctatttgtgcaatttgcaagtgtagatttcaagcgctttaaggtcaatggcagaaaaggaaatatcttcgtttcaaaactagacagaatcattcccacaaactgcgttgtgatgtgttcgttcaactcacagagtttaacatttctgttcatagagcagttaggaaacactctgtttgtaaagtctgcaagtggatattcagacctccttgaggccttcgttggaaacgggatttcttcatattctgctagacagaagaattctcagtaacttccttgtgttgtgtgtattcaactcacagagttgaacgatcctttacactgagcagacttgaaacattctttttgtggaatttgcaagtggagatttcagccgctttgtggtcaatggtagaataggaaatatcttcctatagaaactagtcagaatgattctcagaaactcctttgtgatgtgtgcgttcaactcacagagtttaacctttcttttcatagagcagttagtaaacactctgtttggaaagtctgcaagtggatattcagacctctttgaggccttcgttggaaacgggatttcttcatattctgctagacagaagaattcccagtaactttcttgtgttgtgtgtgttcaactcacagggttgaactttcatttacacagagcagatttgaaacactctttttgtggaatttgcaaatggagatttcaagcgctttgaggccaaaggcagaaaaggaaatatcttcgtataaaaactagacagaatcattctcagaaactgctgcgtgatgtgtgcgttcaactctcagagtttaacttttcttttcattcagcggtttggaaacactctgtttgtaaagtctgcacgtggatattttgacctcttagaggccttcgttggaaacgggttttttttcatgtaaggctagacagaagaattctcagtaacttccttgtgttgtgtgtattcaactgacagagttgaactttcatttagagagagcagatttgaaacactctatttgtgcaatttgcaagtgtagatttcaagcgctttaaggtcaatggcagaaaaggaaatatcttcgttttaaaactagacagaatcattcccacaaactgcgttgtgatgtgttcgttcaactcacagagtttaacctttctgttcatagagcacttaggaaacactctgtttgtaaagtctgtaagtggatattctgacatcttgtggccttcgttggaaacgggatttcttcatattctgctagacagaagaattctcagaaacttccttgtgttgtgtgtattcaactcacagagttgaacgatcgtttacacagagcagacttgaaacactcttgttgtggaatttgcaagtggagatttcagccgctttgaggtcaatggtagaatagtaaatatcttcctaaagaaactagacagaatgattctcagaaactcctttgtgatgtgtgtgttcaactcacagagtttaacctttcttttcatagagcagttagtaaacactctgtttataaagtctgcaagtggatattcagacccctttgaggccttcgttggaaacgggatttcttcatattttgctagacagaagaattctcagtaacttgcttttgttgtgtgtattcaactgacagagttgaactttcatttagacagagcagaattgaaacactctttttctggaatttgcaagtggagatttcaagcgctttgaggccaaaggcagaaaaggatatatcttcgtataaaaactagacagaatcattctcagaaactgctctgcgatgtatgcgttcaactctcagagtttaacttttcttttcattcagcagtttagaaacactctgtttgtaaagtctgcacgtggatattttgaccacttagaggccttcgttggaaacgggtttttttcatgtaaggctagacagaagaattctcagtaacttccttgtgttgtgtgtattcaactcacagagttgaacgatcctttacacagagcagacttgaaacactctttttgtggaatttgcaagtggagatgtcagccgctttgtggtcaatggtagaataggaaatatcttcctatagaaactagacagaatgattctcagaaactcctttgtgatgtgtgcattcaacttacagagttcaacctttcttttcatagagcagttgggaaacactctgtttgtaaagtctgcaagtggatattcggacttatttgaggccttcgttggaagcgggatttcttcatattctgctagacagaagaattctcagtaacttccttgtgttgtgtgtattcaactcacagagttgaacgatcctttacacagagcagacttgaaacactctttttgtggaatttgcaagtggagatttcagccgctttgaggtcaatggtagaataggaaatatcttcctataggaaactagacagaatgattctcagaaactcctttgtgatgtgtgcgttcaactcacagagttcaacctttcttttcatagagcagttgggaaacactctgtttgtaaagtctgcaagtggatattcagacatccttgaggctttcgttggaaacgggatttcttcatattatgctagaaagaagaattctcagtaacttccttgtgttgtgtgtattcaactgacagagttgaactttcatttagagagagcagatttgaaacactgatttgtgaaatttgcaagtggagatttcaagcgctttggggccaaaggcagaaaaggaaatatcttcgtataaaaactagacagaatcattctcagaagctgctgcgtgatgtgtgcgttcaactctcagagtttaacttttcttttcattcagcggtttggaaacactctgtttgtaaagtctgcacgtggatattttgaccacttagaggccttcgttggaaacgggtttttttcatgtaaggctagacagaagaattcccagtaacttccttgtgttgtgtgcattcaactcacagagttgaacgttcccttagacagagcagatttgaaacactctatttgtgaaatttccaagtgtagatttcaagcgctttaaggtcaacggcagaaaaggaaatatcttcgtttcaaaactagacagaatgattctcagaaactcctttgtgatgtgtgcgttcaactcacagagtttaacctttcttttcatagagcagttaggaaacactctgtttgtaaagtctgcaagtggatattcagacctctttgaggccttctttggaaacgggatttcttcatattctgctagagagaagaattctcagtaacttcattgtgttgtgtgtattcaactcacagatttcaacgatcctttacacagagcagacttgaaacactctttttctggaatttgcaagtgtagatttcagccgctttgaggtcaatggtagaataggaaatatcttcctatagaaactagacagaatgattctcagaaactcctttgtgatgtgtgcgttcaactcacagagttcaacctttcttttcatagagcagttaggaaacactctgtttgtaaagtctgcaagtggatattcagacatccttgaggctttcgttggaaacgggatttcttcatattatgctagaaagaagaattctcagtaacttctttgtgttgtgtgtattcaactgacagatttgaactttcatttagagagagcagatttgaaacactgtttttgtggaatttgcaagtggagatttcaagcgctttggggccaaagtcagaaaaggaaatatcttcgtataaaaactagacagaatcattctcagaaactgctgcgtattgtgtgcgttcaactctcagagtttaacttttcttttcattcagcggtttggaaacactctgtttgtaaagtctgcacgtggatattttgaccacttagaggccttcgttggaaacgggattttttcatgtaaggctagacagaagaattcccagtaacttccttgtgttgtgtgcattcacctcacagagttgaacgttcccttagacagagcagatttgaaacactctatttgtgcaatttgcaagtgtagatttcaagcgctttaaggtcaatggcagaaaaggaaatatcttcgtttcaaaactagacagaatgattctcagaaactcctttgtgatgtgtgcgttcaactcacagagttcaacctttcttttcatagagcagttgggaaacactctgtttgtaaagtctgcaagtggatattcagacttctttgaggccttcgttggaagcgggatttcttcatattctgctagacaaaagaattctcagtaacttcctagtgttgtgtgtattcaactcacagagttgaacgatcctttacacagagcagacttgaaacactctttttgtggaatttgcaagtggagatttcagccgctttgaggtcaatggtagaataggaaatatcttcgtatagaaactagacagaatgactctcataaactcctttgtgatgtgtgcgttcaactcacagagtttaacctttcttttcatagagcagttaggaaacactctgtttgtaaagtctgcaagtggatattcagacctccttgaggccttcattggaaacgggatttcttcatattctgctagacagaagaattcccagtaacttccttgtgttgtgtgtgttcaactcacagagttgaactttcatttacccagagcagatttgaaacactctttttgtggaatttgcaagtggagatttcaagcgctttgaggccaaaggcagaaaaggaaatatctccgtttcaaaactagacagaatcattctcagaaactgctctgcgatgtgtgcgttcaactctcagagtttaacttttgttttcattcggcagtttggaaacactctgtttgtaaagtctgcacgtggataatttgaccacttagaggccttcgttggaaacgggtttttttcatgtaaggctagacagaagaattctcagtaacttccttgtgttgtgtgtattcaactcacacagttgaacgatcctttacagagagcagacttgtaacactctttttgtggaatttgcaagtggagatttcagccgctttgaagtcaaagtagaaaaggaaatatcttcctataaaaactagacagaatgattctcagaaactcctttgtgatgtgtgcattcaactcacagagtttaacctttcttttcatagagcagttaggaaacactctgtttgtaaagtctgcaagtggatattcagacctatttgaggccttcgttggaaacgggatttcttcatattctgctagagagaagaattctcagtaacttcattgtgttgtgtgtattcaactcacagatttcaacgatcctttacacagagcagacttgaaacactctttttctggaatttgcaagtggagatttcagccgctttgaggtcaatggtagaataggaaatatcttcctatagaaactagacagaatgattctcagaaactcctttgtgatgtgtgcgttcaactcacagagtttaacctttcttttaatagagcagttaggaaacactctgtttgtaaagtctgcaagtggatattcagacctctttgaggccttcgttggaaacgggtttttttcatataaggctagacagaagaattcccagtaacttccttgtgttgtgtgtgttcaactcacagagttgaacgttcccttagacagagcagatttgaagcactctttttgtggaatttgcaagtggagatttcaagcgctttgaggccaaaggcagaaaaggaaatatcttcgtataaaaactagacagaatcattctcagaaactgctctgcgatgtgtgcgttcaactctcagattttaacttttcttttcattcagcagtttggaaacactctgtttgtaaagtctgcacgtggatattttgaccacttagaggccttcgttggaaacgggtttctttcttgtaaggctagacagaagaattcccagtaacttccttgtgttgtgtacattcaactcacagagttgaacgttcccttagacagagcagatttgaaacactctttttgtgcaattggcaaggggagattttaagcgctttaaggtcaatggcagaaaaggaaatatcttcctttcaaaactagacagaatgattctcagaaactcctttgtgatgtgtgcgttaaactcacagagtttaacctttcttttcatagagcagttaggaaacactctgtttgtaaagtctgcaagtggatattcagacatccttgaggctttcgttggaaacgggatttcttcatattctgctagaaagaagaattctcagtaatttccttgtgttgtgtgtattcaactcacagagttgaacgatcctttacagagagcagacttgaaacactctttttgtggaatttgcaagtggagatttcagccgctttgaagtcaatggtagaataggaaatatcttcctacagaaaagagacagaatgattctcagaaactcctttgtgatgtgtgcgttgaactcagagagtttaacctttcttttcatagagcagttaggaaacactctgtttgtaaagtctgcaagtggatattcagacatccttgaggctttcgttggaaacgggatttcttcatattctgctagaaagaagaattcccagtaacttccttgtgttgtgtgtgttcaactcacagagttgaactttcatttacacagagcagatttgaaagactctttttgtggaatttgcaagtggagatttcaagcgctgtgaagccaaaggcagaaaaggaaatatcttcgtataaaaactagacagaatcattctcagaaactgctgcgtgatgtgtgcgttcaactctcagagtttaacttttcttttcattcagcggtttggaaatactgtgtttgtaaagtctgcacgtgcatattttgaccactaagaggccttcgttggaaacgggtttttttcatgtaaggctagacagaagaattcccagtaacttccttgtgttgtgtgcattcaactcacagagttgaacgttcccttagacagagcagatttgaaacactctatttgtccaatttgcaagtgtagatttcaagcgctttaaggtcaacggcagaaaaggaaatatcttcgtttcaaaactagacagaatcattcccacaaactgcgttgtgatgtgttcgttcaactcacagagtttaacctttctgttcatagagcagttaggaaacactctgtttgtaaactctgtaagtggatattctgacatcttgtggccttcgttggaaacgggatttcttcacattctgctagacagaagaattctcagaatcttccttgtgtagtgtgtattcaactcacagagttgaacgatcctttacacagagcagacttgaaacactctttttgtggaatttgcaagtggagatttcagccgctttgaggtccatggtagaaaaggaaatatcttcgtataaaaactagacagaatgattctcagaaacttctttgtgatgtgtgcattcaactcacagagtttaacctttcttttcatagagcagttaggaaacactctgtttgtaaactctgcaagtggatattcagacctctttgaggccttcgttggaaacgggatttcttcatactatgctagacagaagaattctcagtaacttccttgtgttgtgtattcaactgacagagttgaactttcatttagagagagcagatttgaaacactgtttttgtggaatttgcaagtggagatttcaagcgctttggggccaaaggcagaaaaggaaatatcttcgtataaaaactagacagaatcattctcagaaactgctctgcgatgtgtgcgttcaactctcagagtttaacttttcttttcattcagcagtttggaaacactctgtttgtaaagtctgcacgtggatattttgaccacttagaggccttcgttggaaatgggtttttttcctgtaaggctagacagaagaattcccagtaacttccttgtgttgtgtgcattcaactcacagagatgaacattcccttagacagagcagatttgaaacactctatttgtgtaatttgcaagtgtagatttcaagcgctttaaggtcaatggcaaaaaaggaaatatctgcgtttcaaaactagacagaatcattcccacaaactgcgttgtgatgtgttcgttcaactcacagactttaacctttctgttcatagagcagttaggaaacacactgtttgtaaagtctgcaagtggatattcagacctccttgaggccttcgttggaaacggtatttcttcatattctgctagacagaaaaattctcagtaacttccttgtgttgtgtgtattcaactcacagagttgaactatcctttacaaagagcagacttgaaacactctttttgtggaatttgcaagtggagatttcagccgctttgaggtcaatggtagaaaaggaaatatcttcgtataaaaactagacagaatgattctcataaactactttgtgatgtgtgcgttcaactcacagagtttaacttttcttttcatagagcagttaggaaacactctgtttgtaaagtctgcaagtggatattcagacctctttgaggccttcgttggaaacgggatttcttcatattctgctagacagaagaattctcagcaacttccttgtgttgtgtgtattgaactcacagagttgaacgatcctttacacagagcagacttgaaacactctatttgtagaatttgcaagtggagatttcagccgctttgaggtcaatagtagaaaaggaaatatcttcgtagaaaaactagacagaatgattctcagaaactcctttgtgatgtgtgtgttcaacgcacagagtttaacctttcttttcatagagcagttaggaaacactctgtttgtaaagtctgcaagtggatattcagacctctttgaggccttcgttggaaacgggtttttttcatataaggctagacagaagaattcccagtaacttccttgtgttgtgtgtgttcaactcacagagttgaactttcgtttacacagagcagatttgaaacactctttttgtggaatttgcaagtggagatttcaagcgctttgaggccaaaggcagaaaaggaaatatcttcgtttcaaaactagacagaatcattctcagaaactgctctgtgatgtgtgcgttcaactctcagagtttaacttttcttttcattcagcactttggaaacactctgtttgtaaagtcttcacgaggatattttgaccacttagaggtctttgttggaaacgggtttttttcacataaggctagacagaagaattcccagtaacttccttgtgttgtgtgcattcaactcacagagttgaacgttccttagacacagcagatttgaaacactctatttgtgcaatttgcaagtgtagatttcaagcgctttaaggtcaatggcagaaaaggaaatatcttcgtttcaaaactagacagaaatcattcccacaaactgcgttgtgatgtgttcgttcaactcacagagtttaacctttctgttcatagagcagttaggaaacactctgtttgtaaagtctgtaagtggatattcagacatcttgtggccttcgttggaaacgggatttcttcatattctgctagacagaagaattctcagtaacttccttgtgttgtgtgtattcaactcacagagttgaacgatcctttacacagagcagagttgaaacactctttttgtggaatatgcaaggggagatttctgccgctttgagtcaatggtagaaaaggaaatatcttcgtataaagactagacagaatgattctcagaaactcctttgtgatgtgtgcgttcaactcacacagtttaacctttcttttcatagagcagttgggaaacactctgtttgtaaagtctgcaagtggatattcagacctccttgaggccttcgttggaaacgggatttcttcatattatgctagacagaagaattctcagtaacttccttgtgttgtctgtattcaactcacagagttgaacgatcctttacacagagcagacttgaaacactctttttgtggaatttgcaagtggagatttcagccgctttgaagtcaatggtagaataggaaatatcttcctatagaaactagacagaatgattctgagaaactcctttgtaatgtgtgcgttcaactcacagagtttaacctttcttttcatagagcagttaggaaacactctgtttgtaaagtctgcaagtggatattcagacctccttgaggccttcgttggaaacgggatttcttcatattatgctagacagaagaattcccagtaacttccttgtgttgtgtgtgttcaactcacagagttgaactttgatttacacagagcagatttgaaacactctttttgtggaatttgcaagtttagatttcaagcgctttgaggccaaaggcagaaaaggaaatatcttcgtataaaaactagacagaatcattctcagaaactgctctgtgatgtgtgcgtccaactctcagagtttaaattttcttttcattcagcagtttggaaacactctgtttgtaaagtctgcacgtggatattttcagcacttagaggccttcgttggaaactgttttttttcatgtaaggctagacagaagaattcccagtaacttccttgtgttgtgtgcattcaactcacagagttgaacgttcccttagacagagcacatttgaaacactctatttgtgcaatttgcaattgtagatttcaagcgctttaaggtcaatggcagaaaaggaaatatcttcgttttaaaaatagacagaatcattcccacaaactgcgttgtgatgtgttcgttcaactcacagagtttaacctttctgttcatagagcagttaggaaacactctgtttgtaaagtctgtaagtggatattctgacatattgtggccttcgttggaaacgggacttcttcatattctgctagacagaagaattctcagtaacttccttgtgttgtgtgtattcaactcacagagttgcacgatcctttacacagagcggacttgaaacactctttttgtggaatttgcaagtggagattttagccgatttgaggtcaatggtagaataggaaatatcttcctatagaaactagacagaatgattctcagaaactcctttgtgatgtgtgtgttcaactcacagagtttaacctttcttttcatagagcagttagtaaacactgtgtttataaagtctgcaagtggatattcagacccctttgaggccttcgttggaaacgggatttcttcatattatgctagacagaagaattctcagtaacttccttgtgttatgtgtattcaactgacagagttgaactttcatttagagagagcagatttgaaacactgtttttgtggaatttgcaagtggagatttcaagcgctttggggccaaaggcagaaaaggaaatatcttcgtatgaaaactagacagaatcattctcagaaactgctgcgtgatgtgtgcgttcaactctcagagtttaacttttcttttcattcagcggtttggaaacactctgtttgtaaagtctgcacgtggatattttgaccacttagaggccttccttggaaacgggtttttttcatgtaaggctagacagaagaattcccagtaacttccttgtgttgtgtgcattcaactcacagagttgaacgttcccttagacagagcagatttgaaacactctatttgtgcaatctgcaagtgtagatttcaagcgctttaaggtcaacggcagaaaaggaaatatcttcgtttcaaaactagacagaatcattcccacaaactgcgttgtgatgtgttcgttcaactcacagagtttaacctttctgttcatagagcacttaggaaacactctgtttgtaaagtctgcatgtggatattcagacctcctagaggccttcgttggaaacgggatttcttcatattctgctagacagaagaattctcagtaacttccttgtgttgtgtgtattcaagtcacagagttgaacgatcctttacacagagcagatttgaaacactctttttgtggaatttgcaagtggagatttctgccgctttgtggtcaatggtggaaaaggaaatatcttcatataaaaacaagacagaatgattctcataaactcctttgtgatgtgtgcgttcaactcacagagtttaacttttcttttcatagagcagttaggaaacactctgtttgtaaagtctgcaagtggatattcagacctttttgaggccttcgttggaaacgggatttcttcatattatgctagacagaataattctcagtaacttccttgtgttgtgtgtattcaactgacagagttgaactttcatttagagagagcagatttgaaacactgtttttgtggaatttgcaagtgtagatttcaagcgctttggggccaaaggcagaaaaggaaatatcttcgtataaaaagtagacagaatcattctcagaaactgctctgcgatgtgtgcgttcaactctcagagtttaacttttcttttcattcagcagtttggaaacactctgtttgtaaagtctgcacgtggataatttgaccacttagaggccttcgttggaaacgggtttttttcgtgtaaggctagacagaagaattcccagtaacttccttgtgttgtgtgcattccactcacagagttgaacgttcccttagacagagcagatttgaaacactctatttgtgcaatttgcaagtgtagatttcaagcgctttaaggtcaatggcagaaaaggaaatatcttcgtttcaaaactagacagaatcattcccacaaactgcgttgtgatgtgttcgttcaactcacagagtttaacctttctgttcatagagcagttaggaaacactctgtgtgtaaagtctgcaagtggatattcagacctctttgaggccttcgttggaaacgggatttcttcatattctgctagacagaagaattctcagtaactttccttgtgttgtgtgtattcaactcacagagttgaatgatcctttacacagaacagtcttgaaacactctttttgtggaatttgcaagtggagatttcagccgctttgaggtcaatggtagaataggaaatatcttcctatagaaactagacagaatgattctcagaaactcctttgtgatgtgtgcgttgaactcacagagtttaacctttcttttcatagagcagttaggaaacactctgtttgtaaagtctgcaagtggatattaagacctctttgacgccttcgttggaaacgggatttcttcatattctgctagacagaaggaattcccagtaacttccttgtgttgtgtgtgttcaactcacagagttgaactttcatttacacagagcagatttgaaacactctttttgtggaatttccaagtggagatttcaagcgctttgaggccaaaggcagaaaaggaaatatcttcgtataaaaactagacagaatcattctcagaaactgctctgcgatgtgtgcgttcaactctcagagtttaacttttcttttcattcagcagtttggaaacactctgtttgtaaagtctgcaagtggatattttgaccatttagaggccttcgttggaaacgggtttttttcctgtaaggctagagagaagaattcccagtaactcccttgtgttgtgtgcattcaactcacagagttcaacgttcccttagacagagcagatttgaaacactctatttgtgcaatttgcaagcgtagatttcaagcgctttaaggtcaatggcagaaaaggaaatatcttcgtttcaaaactagacagaataattcccacaaactgcgttgtgatgtgttcgttcaactcacagagtttaacctttctgttcatagagcagttaggaaacactctgtttgtaaagtctgtaagtggatattctgacatcttgaggccttcgttggaaacgggatttcttcatattctgctagacagaagaattctcagtaacttccttgtgttgtgtgtattgaactcacagagttgaacgatcctttacacagagcagtcttgaaacactgtttttgtggaatttgcaagtggagatttctgccgctttgaggtcaatggtagaataggaaatatcttcctatagaaactagacagagtgattctcagaaactcctttgtgatgtgtgcgttcaactcacagagtttaacctttcttttcatagagcagttaggaaacactctgtttgtaacgtctgcaagtggatattcagacctccttgaggccttcgttggaaacgggatttcttcatattctgctacagagaagaattctcagtaacttccttgtgttgtgtgtattcaactcacagagttgaacgttcctttacacagagcaggacttgaaacactctttttgtggaatttgcaagtggagatttcaagcgctttgaggccaaaggcagaaaaggaaatatcttcgtataaaaactagacagaatcattctcagaaactgctctgcgatgtgtgtgttcaactctcagagtttaacttttcttttcattcagcagtttggaaacactctgtttgtaaagtctgcacgtggatattttgaccacttagaggccttcgttggaaacgggtttttttcctgtaaggctagacagaagaattcccagtaacttccttgtgttgtgcacattcaactcacagagttgaacgttcccttagacagagcagatttgaaacactctttttgtgcaattggcaagtggagatttcaagcgctttgaggtcaatggcagaaaaggaaatatcttcgtttcaaaattagacagaatgattctcagaaactcctttgtgatgtgtgcattcaactcacagagtttaacctttcttttcatagagcagttaggaaacactctgtttgtatagtctgcaagtggatattcagacctctttgaggccttcgttggaaacgggatttcttcatattatgctagacagaagaattctcagtaacttccttgtgttgtgtgtattcaactcacagagttgaatgatcctttacacagaacagacttgaaacactctttttgtggaatttgcagggggagatttcagccgctttgaggtcaatggtagaaaaggaaatatcttcctatagaaactagacagaatgattctcagaaactcctttgtgatgtgtgcgttcaactcacagagtttaacctttcttttcatagagcagttaggaaacactctgtttgtaaagtctgcaagtggatattcagacatccttgaggctttcgttggaaaagggatttcttcatattctgctagaaagaagaattctcagaaacttccttgagttgtgtgtattcaactcacagagttgaacgatcgtttacacagagcagacttgagacactctttttgtggaatttgtaagtggagatttcagccgatttgaggtcaatggtagaaaaggaaatatcttcatataaaaactagacagaatcattctcagaaactgctctgcgatgtgtgcgttcaactctcagagtttaacttttcttttcattcagcagtttggaaacactctgtttgtaaagtctgcacgtggataacttgaccacttagaggacttcgttggaaacgggtttttttcctgtaaggctagacagaagaattcccagtaacttccttgtgttgtgtacattcaactcacagagttgaacgtttccttagagagagcagatttgaaacactctttttgtgcaattggcaagtggtgatttcagccgctttgaggtcaatggtggaaaaggaaatatcttcgtataaaaactagacagaatcattctcagaaaatgctctgtgatgtgtgcgttcaactctcagagtttaacttttcttttcattcagcactttggaaacactctgtttgtaaagtctgcacgaggatcttttgaccacttagaggtctttgttggaaacgggtttttttcacgtaaggctagacagaagaattcccagtaacttccttgtgttgtgtatattcaactcacagagttgaacgatcctttacacagagcagatttgaaacactctttttgtggaatttgcaagtggagatttcagccgctttgaggtcaatggtagaaaaggaaatatcttcgtttcaaaactagacagaatgattctcagaaactcctttgtgatgtgtgcgttcaactcacagaagtttaacctttcttttcatagagcagttaggaaacactctgtttgtaaagtctgcaagtggatattcagacatctttgaggctttcgttggaaacgggatttcttcatattctgctagacagaagaattctcagaaacttccttgtgttgtgtgtattcaactcacagagttgaacgatcctttacacagagcagacttgaaacactccttttctggaatttgcaggtggagatttcagccgctttgaggtcaatggtagaatagtaaatatcttcgtataaaaactagacagtatcattctcagaaactgctctgcgatgtgtgcgttcaactctcagagtttaacttttcttttcattcagcagtttggaaacactctgtttgtaaagtctgcacgtggatattttgaccacttagaggccttcgttggaaatgggtttttttcctgtaaggctagacagaagaattcccagtaacttccttgtgttgtgtacattcaactcacagagttgaacgttcccttagacagagcagatttgaaacactttttttgtgcaattggcaaatggagatttcaagcgctttaaggtcaatggcagaaaaggaaatatcttcgtttcaaaactagacagaatcattcccacaaactgcgttgtgaggtgttcgttcaactcacagagtttaacctttcttttcatagagcagttaagaaacagtctgtttgaaaattctgtaagtggatattctgacatcttgtggccttcgttggaaacgggatttcttcatattctgctagacagaagaattctcagaatcttccttgtgttgtgtgtattcaactcacagagttgaacgatggtttacaaagagcagatttgaaacactcatttggtggaatttgcaagtggagatttcagccgctttgaggtcaatggtagaaaaggaaatatcttcgtataacaactagacagaacgattctcagaaactccgttgtgatgtttgcgttcaactcacagagtttaacctttcttttcatagagcagttaggaaacactctgtttgtaaagtctgcaagtggatattcagacctctttgaggccttcgttggaaacgggatttcttcctattctgctagacagaagaattcccactaacatccttgtgttgtgtgtgttcaactcacagagttgaactttcatttacacagagcagatttgaaagactctttttgtggaatttgcaaatggagatttcaagcgctttgaggccaaaggcagaaaaggaaatatcttcgtttcaaaactagacagaatcattctcagaaactgctgcgtgatgtgtgcgttcaactctcagagtttaacttttcttttcattcagcggtttggaaacactctgtttgtaaagtctgcaagtggatattttgaccacttagaggccttcgttggaaacgggtttttttcatgtaaggctagacagaagaattcccagtaacttccttgtgttgtgtgcattcaactcacagagttgaacgttcccttagacagagcagatttgaaacactctatttgtgcaatttgcaagtgtagatttcaagcgctttaaggtcaatggcagaaaaggaaatgtcttcgtttcaaaactagacagaatcattcccacaaactgcgttgtgatgtgttcgttcaactaacagagtttaacctttcttttcatagagcagttaggaaacagtctgtttgtaaattctgtaagtggatattctgacatcttgtggccttcgttggaaacgggatttcttcatattctgctagacagaagaattcccagtaacttccttgtgttgtgtgtgttcaactcacagtagttgaactttcatttacacagagcagatttgaaacactctttttgtggaatttgcaaatggagatttcagccgcgttgaggtcaatggtagaaaaggaaatatcttcgtttcaaaactagacagaatgattctcagaaactcctttgtgatgtgtgtgttcaactcacagagtttaacctttcttttcatagagcagttagtaaacactctgtttataaagtctgcaagtggatattcagacccctttgaggccttctttggaaacgggatttcttcatattctgctagacagaagaattcccagtaacttccttgtattgtgtgtgttcaactcacagagttgaactttcatttacacagagcagatttgaaacactctttttgtggaatttgcaagtggagatttcaagcgctttgaggccaaaggcagaaaaggaaatatcttcgtataaaaactagacagaatcattctcagaaactgctctgtgatgtgtgcgttcaactctcagagtttaacttttcttttcattcagcagtttggaaacactctgtttgtaaagtctgcacgtggataatttgaccacttagaggccttcgttggaaacgggtttttttcatgtaaggctagacagaagaattcccagtaacttccttgtgttgtgtacattcaactcacagagttgaaccttcccttagacagagcagatttgaaacactctttttgtgcaattggcaagtggagatttcaagcgctttgaggtcaatggcagaaaaggaaatatcttcgtttcaaaactagacagaatcattcccacaaactgcgttgtgatgtgttcgttcaactcacagcagtttaacctttctgttcatagagcagttaggaaacactctgtttgtaaagtctgtaagtggatattctgacatcttgtggccttcgttggaaacgggatttcttcatattctgctagacagaagaattctcagtaacttctttgtgttgtgtgtattcaactcacagagttgaacgatcctttacacagagcagacttgaaacactctttttgtggaatttgcaagtggagttttcagccgctttgaggtcaatggtagaataggaaacatcttcctatagaaactagacagaatgattctcagaaactcctttgtgatgtgtgcgttcaactcacagagtttaacctttcttttcatagagcagttgggaaacactctgtttgtaaagtctgcaagtggatattcagacctccttgaggctttcgttggaaacgggatatcttcatattctgctagaaagaagaattctcagaaacttccttgtgttgtgtgtattcaactcacagagttgaacgttcgtttacacagagcagacttgagacactctttttgtggaatttgtaagaggagatttcagccgctttgaggtcaatggtagaaaaggaaatatcttcatataaaaactagacagaatgattctcagaaactcctttgtgatgtgtgcgttcaactcacagagtttaacctttcttttcatagagcagttagtaaacactctgtttataaagtctgcaagtggatattcagacccctttgaggccttcgttggaaacgggatttgttcatattctgctagacagaagaattcccagtaacttccttgtgttgtgtgtgttcaactcacagagttgaactttcatttacacagagcagatttgaaacactttttttgtggaatttgcaagtggagatttcaagcgctttgaggccaaaggcagaaaaggaaatatcttcgtataaaaactagacagaatcattctcagaaactgctctgcgatgtgtgcgttcaactctcagagtttaactttgcttttcattcagcagtttggaaacactctgtttgtaaagtctgcacgtggataatttgaccacttagaggccttcgttggaaacgggtttttttcatgtaaggctagacagaagaattcccagtaacttccttgtgttgtgtacattcaactcacagagttgaacgttcccttagacagagcagatttgaaacactctttttgtgcaattggcaaatggagatttcaagcgctttaaggtcaatggcagaaaaggaaatatcttcgtttcaaaactggacagaatgattctcataaactcctttgtgatgtgtgcgttcaactcacacagtttaacctttcttttcatagagcagttaggaaacactctgtttgtaaagtctgcaagtggatattcagacctctttgaggccttcgttggaaaccggatttcttcatattctgctagacagaagaattctcagtaacttccttgtgttgtgtgtattcaactcacagagttgaacgatcctttacacagagcagacttgaaacactctttttgtggaatttggaagtggagatttcagccgctttgaggtcaatagtagaaaaggaaatatcttcgtagaaaaactagacagaatgattcccagaaactcctttgtgatgtgtgcgttcaactcacagagtttaacctttctattcatagagcagttaggaaacaatctgtttgtaaagtctgcaagtcgatattcagacgtctttgcggccttcgttggaaacgggtttttttcatataaggctagacagaagaattctcagtaacttccttgtgttgtgtgtattcaactgacagagttgaactttcatttagatagagcagatttgaaacactgtttttgtggaatttgcaagtggagatttcaagcgctttggggccaaaggcagaaaaggaaatatcttcgtataaaaactagacagaatcattctcagaaactgctgcgtgatgtgtgcgttcaactctcagagtttaacttttcttttcattcagcggtttggaaacactctgtttgtaatgtctgcacgtggatattttgaccacttagaggccttcattggaaacgggtttttttcatgtaaggctagacagaagaattcccagtaacttccttgtgttgtgtgcattcaactcacagagttgaacgttcccttagacagagcagatttgaaacactctatttgtgcaatttgcaagtgtagatttcaagcgctttaaggtcaacggcagaaaaggaaatatcttcgattcaaaactagacagaatcatttccacaaactgcgttgtgaagtgctcgttcaactcacatagtttaacctttctgttcatagagcagttaggaaacactctgtttgtagtgtctgtaagtggatattctgacatcttgtggccttcgttggaaacggaatttcttcatattctgctagacagaagaattctcagaaacttccttgtgttgtgtgtattcaactcacagagttgaacgatcctttacacagagcagacttgaaacactctttttgcggaatttgcaagtggagatttcagccgctttgaggtcaatggtagaataggaaatatcttcctatagaaactagacagaatgattctcataaactcctttgtgatgtgtgcgttcaactcccagagtttaaactttcttttcatagagcagttaggaaacactctgtttgtaaagtctgcaagtggatattcagacctgcttgaggccttctttggaaacgggatttcttcatattatgctagacagaagaattctcagtaacttccttgtgttgtgtgtattcaactgacagagttgaactttcatttcgagagagcagatttgaaacactgtttttgtggaatttgcaagtggagatttcaagcgctttggggccaaaggcagaaaaggaaatatcttcgtataaaaactagacagaatcattctcagaaactgctctgcgatgtgtgcgttcaactctcagagtttaacttttctttttattcagcagtgtggaaaaactctgtttgtaaagtctgcacgtggatattttgaccacttagaggccttcgttggaaacgggtttttttcctgtaaggctagacagaagaattcccagtaacttccttgtgttgtgtacattcaactcacagagttgaacgttcccttagacagagcagatttgaaacactctttttgtgcaattggcaagtggtgatttcagccgctttgaggtcaatggtagaaaaggaaatatcttcgtattaaaactagacagaatgattctcagaaactcctttgtgatgtgtgcgttcaactcacagagtttaacctttcttttcatagagcagttgggaaacactctgtttgtaatgtctgcaagtggatattcagacttctttgaggccttcgttggaagcgggatttcttcatgttctgctagacagaagaattctcagaaacttccttgtgttgtgtgttttcaactcacagagttgaacgatcctttacacagagcagacttgaaacactccttttgtggaatttgcacgtggagatttcagccgctttgaggtcaatggtagaataggaaatatcttcctatagaaagtagacagaatgattctcagaaaatcctttgtgatgtgtgcgttcaactcacagagtttaacttttcttttcatagagcagttaggaaacactctgtttgtaaagtctgcaagtggatattcagacctctttgaggccttggttggaaaccggatttcttcatattatgctagacagaagaattctcagtaacttccttgtgttttgtgtattcaactgacagagttgaactttcatttagagagagcagatttgaaacactgtttttgtggaatttgcaagtggagatttcaagcgctttggggccaaaggcagaaaacgaaatatcttcgtataaaaactagacagaatcattctcaaaaactgctctgcgatgtgtgcgttcaactctcagagtttcacttttcttttcattcagcagtttggaaacactctgtttgtaaagtctgcacgtggataatttgaccacttagaggctttggttggaaacgggtttttttcatgtaaggctagacagaagaattcccagtaacttccttgtgttgtgtacattcaactcacagagttgaacgttcccttagacagagcagatttgaaacactctttttgtgcaattggcaagtggagatttcaagcgctttgaggtcaatggcagaaaaggaaatatcttcgtttcaaaactagacagaatcattcccaaaaactgcgttgtcatgtgttcgttcatctcacagagtttaacctttcttttcatagagcagttaggaaacagtctgtttgtaaattctgtaagtggatattctgacatcttgtggccttcgttggaaacgggatttcttcatattctgctagatagaagaattctcagaatcttccttgtgttgtgtgtattcaactcacagagttgaacgatggtttacacagagcagatttgaaacactctttttgtggaatttgcaagtggagatttcagccgctttgaggtcaatggtagaaaaggaaatatcttcctataaaaactagacagaacgattctcagaaattcctttgtgatgtgtgcgttcaactcacagagtttaacctttcttttcatagagcagttaggaaacactctgtttgtaaagtctgcaagtggatattcagacctctttgaggccttcgttggaaacgggatttcttcctattctgctagacagaagaattcccagtaacttccatgtgttgtgtgtgttcaactcacagagttgaacgttcccttagacagagcagatttgaaacactctttttgtagaatttgcaagtggagatttcaagcgctttgaggccaaaggcagaaaaggaaatatcttcgtataaaaactagacagaatcattctcagaaactgctctgcgatgtgtgcgttcaactctcagagtttaacttttcttttcattcagcagtttggaaacactctgtttgtaaagtctgcacggggatattttgaccacttagaggccttcgttggaaacgggtttttttcctgtaaggctagacagaagaattcccagtaacttccttgtgttgtgtgcattcaactcacagagttgaacgttcccttagacagagcagatttgaaacactctatttgtccaatttgcaagtgtagatttcaagcgctttaaggtcaacggcagaaaaggaaatatcttcgtttcaaaactagacagaatgattctcagaaactcctttgtgatgtgtgcgttcaactcacagagtttaacctttcttttcatagagcagttaggaaacactctctttgtaaagtctgcaagtggatattcagacctctttgaggcctttgttggaaacgggatttcttcatattatgctagacagaagaattctcagtaacttccttgtgttgtgtgtattcaactcacagagttgaacgatcctttacacagagcagacttgaaacactctttttgtggaaattgcaagtggagatttcagccgctttgaagtcaatggtagaaaaggaaatatcttcgtataaaaactagacagaatgattctcagaaacttctttgtgatgtgtgcgttcaactcacagagtttaacctttcttttcatagagcagttaggaaacactctgtttgtaaactctgcaagtggatatacagacctctttgaggccttcgttggaaacgggatttcttcatactatgctagacagaagaattctcagtaacttccttgtgttgtgtgtattcaactgacagagttgaactttcatttagagagagcagatttgaaacactgtttttgtggaatttgcaagtggtgacttcaagcgctttggggccaaaggcagaaaaggaaatatcttcgtataaaaactagacagaatcattctcagaaactgctctgcgatgtgtgcgttcaactctcagagtttaacttttcttttcattcagcagtttggaaacactctgtttgtaaagtctgcacgtggataatttgaccacttagaggccttcgttggaaacaggtttttttcatgtaaggctagacagaagaattcccagtaacttccttgtgttgtgtgcattcaactcacagagttgaacgttcccttagacagagcagatttgaaacactctatttgtgcaatatgcaactgtagatttcaagcgctttaaggtcaatggcagaaaaggaaatatcttcgtttcaaaactagacagaatcattcccacaaactgcgttgtgatgtgttcgttcaactcacagagtttaacctttctgttcatagagcagttaggaaacactctgtttgtaaagtctgtaagtggatattctgacatcttgtggcattcgttggaaacgggatttcttcatattctgctagacagaagaattctcagtaacttccttgtgttgtgtgtattcaactcacagaattgaacgatcctttacacagagcagacttgaaacacactttttgtggaatttgcaagtggagatttcagccgctttgaggtcaatggtagaaaaggaaatatcttcgtatagaaacaagacagaatgattctcagaaactcctttgtgatgtgggtgttcaactcacagggtttaactttcttttcatagagcagttaggaaacacactgtttctaaagtctgcaagtggatattttcacctctttgaggccttcgttgcaaacggcttttttttcatgtaaggctagacagaagaattctcagtaacttccttttgttgtgtgtattcaactgacagagttgaactttcatttagacagagcagatttgaaacactctttttctggaatttgcaagtggagatttcaagcgctttgaggccaaaggcagaaaaggatatattttcgtataaaaactagacagaatcattctcagaaactgctctgcgatgtatgcgttcaactctcagagtttaacttttcttttcattcagcagtttggaaacactctgtttgtaaagtctgcacgtggatattttgaccacttagaggccttcgttggaaacgggtttttttcatgtaaggctagacagaagcattcccagtaacttccttgtgttgtgtgcattcaactcacagagatgaacgttcccttagacagagcagatttgaaacactctatttgtgcaatttgcaagtgtagatttcaagcgctttaaggtcaatggcagaaaaggaaatatcttcgtttcaaaactagacagaatgattctcagaaacttctttgtgatgtgtgcgttcaactcacagagtttaacctttcttttcatagagcagttaggaaacactctgtttgtaaattctgtaagtggatattctgaaatcttgtggccttcgttggaaacgggatttcttcatattctgctagacagaagaattctcagtaacttccttgtgttgtgtgtattcaactcacagagttcaacgatcctttacacagagcagacttgtaacactctttttgtggaatttgcaagtggagatttcagccgctttgaagtcaaaggtagaaaaggaaatatcttcctataaaaactagacagaaagattctcagaaactcctttgtgatgtgtgcgttcaactcacagagtttaacctttcttttcatagagcagttaggaaacactctgtttgtaaagtctgcaagtggatattcagacctctttgaggccttcgttggaaacgggatttcttcatactgtgctagacagaagaattctcagtaacttccttgtgttgtgtgtattcaactgacagagttgaactttcatttagagagagcagatttgaaacactgtttttgtggaatttgcaagtggagatttcaagcgctttggggccaaaagcagaaaaggaaatatcttcgtagaaaaactagacagaatcattctcagaaactgctctgcgatgtgtgcgttcaactctcagagtttaacttttcttttcattcagcagtttggaaacactctgtttgtaaagtctgcacgtggatattttgaccacttagacgccttcgttggaaacgggtttttttccagtaaggctagacagaagaattcccagtaacttccttgtgttgtgtgcattcaactcacagagttgaacgttcccttagacagagcagatttgaaacactctatttgtgcaatttgcaagtgtagatttcaagcgctttaaggtcaatggtagaaaaggaaatatcttcgttttaaaactagacagaatcattcccacaaactgcgttgtgatgtgctcgttcaactcacagagtttaacctttctgttcatagagcagttaggaaacactctgtttgtaaagtctgcaagtggatattcagacctctttgaggccttcgttggaaaagggatttcttcatattctgctagacagaagaattctcagtaacttccttgtgttgtgtgtatacaactcacagagttgaacgatcctttacacagagcagacttgagacactctttttgtggaatttgcaagtggagatttcagccgctttgagttcaatggtagaataggaaatatcttcctatagaaactagacagaatgattctcagaaactcctttgtgatgtgtgcgttcaactcacagagtttaacttttcttttcatagagcagttagggaacactctgtttgtaaagtctgcaagtggatattcagacctctttgaggccttcgttggaaacgggatttcttcatattctgctagacagaagaattctcagaaacttccttgtgttgtgtgttttcaactcacagagttgaacgatcctttacacagagcagacttgaaacactccttttgaggaatttgcaagtggagatttcagccgctttgaggtcaatggtagaataggaaatatcttcctatagaaactagacagaatgattctcagaaactcctttgtgatgtgtgcgttcaactcacagagtttaacctttcttttcatagagcagttaggaaacactctgtttgtaaagtctgcaagtggatattcagacctgtttgaggccttcgttggaaacgggtttctttcatataaggctagacagaagaattctcaagtaacttccttgtgttgtgtttattcaactcacagagttgaatgatcctttacacagagcagacttgaaacactctttttgtggaaattgcaaatggagatttcagccgctttgaggtcaatggtagaaaagtaaatatcttcgtataaagactagacagaatgattctcagaaactcctttttgatgtgtgcgttcaactcacagagtttaacctttctgttcatagagcagttaggaaacactctgtttgtaaagtctgcaagtggatattcagacctcctagaggccttcgttgaaaacgggatttcttcatattctgctagacagaagaattcccagtaacttccttgtgttgtgtacattcaactcacagaggtgaacgttcccttagacagagcagatttgaaacactctttttgtgcaattggcaagtggagatttcaagcgctttgaggtcaatggcagaaaaggaaatatcttcctttcaaaactagacagaatcattctcagaaactgctctgcgatgtgtgcgttcaactctgagagtttaacttttcttttcattcagcagtttggaaacactctgtttgtaaagtctgcacgtggataatttgaccacttagaggccttcgttggaaacgggtttttttcatgtaaggctagacagaagaattctcagtaacttccttgtgttgtgtgtattcaactcacagagttgaacgatcctttacacagagcagacttgtaacactctttttgtggaatttgcaagtggagatttctgccgctttgaagtcaaaggtagaaaaggaaatatcttcctataaaaactagacagaatgattctcagaaacttctttgtgatgtgtgcgatcaactcacagagtttaacctttcttttcatagagcagttaggaaacactctgtttgtaaactctgcaagtggatgttcagacctgtttgaggccttcgttggaaacgggatttcttcatactatgctagacagaagaattctcaagtaacttccttgtgttgtgtgtattcaactgacagagttgaactttcatttagagagagcagatttgaaactctgtttttgtggaatttgcaagtggagatttcaagcgctttggggccaaaggcagaaaaggaaatatcttcgtataaaaactagacagaatgattctcagaaactcctttgtgatgtgtgcgttcaactctcagagtttaacttttcttttcattcagcagtttggaaacactctgtttgtaaagtctgcacgtggatattttgaccacttagaggccttcgttggaaacgggtttttttcctgtaaggctagacagaagaattctcagtaacttccttttgttgtgtgtattcaactcacagagttgaacgatcgtttacacagaacagattagaaacactctttttgtggaatttgcaagtggagatttcagccgctttgaggtcaatggtagaataggaaatatcttcctatagaaactagacagactgattctcagaaactcctttgtgatgtgtgcgttcaactcacagagtttaacctttcttttcatagagcagttaggaaacactctgtttgtaaagtctgcaagtggatattcagacatctttgaggctttcgttggaaacggggtttcttcatattctgctatagagaagaattctcagaaacttccttgtgttgtgtgttttcaactcacagagttgaacgatgctttacacagagtagacttgaaacactctttttgtggaatttgcaagtggagatttcagccgctttgacgtcaatggtagaaaaggaaatatcttcgtataaaaactagacagaatgattctcagaaactcctttgtgatgtgtgcgttcaacttacagagtttaacctttcttttcatagagcagttaggaaacactctgtttgtaaagtctgcaagtggatattcagacctctttgaggccttcgttggaaacgggatttcttcatactatgctagacagaagaattcccagtaacttccttgtgtgtgtgtgttcaactcacagagttgaactttcatttacacagagcagatttgaaacactctttttgtggaatttgcaaatggggatttcaagcgctttgaggccaaaggcagaaaaggaaatatcttcgtataaaaactagacagaatcattctcagaaactgctctgcgatgtgtgcgttcaactctcagagtttaacttttcttttcattcagcagtttggaaacactctgtaaagtctgcacgtggatattttgaccacttagaggccttcgttggaaacgggtttttttcctgtaaggctagacagaagaattcccagtaacttccttgtgttgtgtgcattcaactcacagagttgaacgttcccttagacagagcagatttgaaacactctatttgtgcaatttgcaagtgtagttttcaagctctttaaggtcaacggcagaaaaggaaatatcttcgtttcaaaactagacagaatcattcccacaaactacgttgtgaggtgttcagtaaactcacagagtttaacctctcttttcatagagcagttgggaaacagtctgtttgtaaattctgtaagtggatattctgacaacttgtggccttcgttggaaacgggatttcttcatattctgctagacagaagaattctcagtaaattccttgtgttgtgtgtattcatctcacagagttgaacgatcctttacacagagcagacttgaaacactctttttgtggaatttgcaagtggagatttcagccgctttgaggtcaatggtagaaaaggaaatatcttcgtataaaaactagacagaatgattctcagaaacacctttgtgatgtgtgcgttcaactcacagagtttaacctttcttttcatagagcagttaggaaacactctgtttgtgaagtctgtaagtggatattcagacctccttgaggccttcgttggaaacgggatttcttcatattatgctagacagaagaattctcagtaacttccttgtgttgtgtgtattcaagtgacagagttgaactttcatttagagagagcagatttgaaacactgtttttgtggaatttgcaagtggagatttccagcgctttggggccaaaggcagaaaaggaaatatcttcgtataaaaactagacagaatcattctcagaaactgctgtgcgatgtgtgcgttcaactctcagagtttaacttttcttttcattcagcagtttggaaacactctgtttgtaaagtctgcacgtggatattttgaccacttagaggccttcgttggaaacaggtttttttcctgtaaggctagacagaagaattcccggtaacttccttgtgttgtgtacattcaactcacagagttgaacgttcccttagacagagcagatttgaaacactctttttgtgcaattggcaaatggagatttcaagcgctttaaggtcaatggcagaaaaagaaatatcttcgtttcaaaactagacagaatcattcccacaaactgcgttgtgatgtgttcgttcaactcacagagtttaacctttcttttcatagagcagttaggaaacagtctgtttgtcaattctgtaagtggatattctgacgtcttgtggccttcgttggaaacgggttttcttcatattctgctagacagaagaattctcagtaacttccttgtgttgtgtgtattcaactcacagagttgaacgatcctttacacagagcagacttgaaacactctttttgtggaatttgcaagtggagatttcagccgctttgaggttaatggtagaaaatgaaatatcttcgtatagaaactagacagaaatgattctcagaaactcctttgtgatgtgtgtgttcaactcacagagtttaacctttcttttcatagaacagttaggaaacactctgtttgtaaagtctgcaagtggatattcagaactctttggggccttcgttggaaacgggtttttttcatataaggctagacagaagaattcccaagtaacttccttgtgttgtgtgtgttcaactcacagagttgaactttcatttacacagagcagatttgaaacactctttttgtggaatttgcaagtggagatttcaagcgctgtgaggccaaaggcagaaaaggaaatatcttcgtataaaaactagacagaatcattctcagaaactgctctgcgatgtgtgcgttcaactctgagagtttaacttttcttttcattcagcagtttggaaacactctgtttgtaaagtctgcacgtggatattttgaccacttagaggccttcgttggaaacgggtttttttcctgtaaggctagacagaagaattcccagtaacttccttctgttgtgtacattcaactcacagagttgaacgttcccttagacagagcagatttgaaacactctttttgtgcaattggcaaatggagatttcaagcgctttaaggtcaatggcagaaaaggaaatatcttcgtttcaaaactagacagaatcattcccacaaactgcgttgtgatgtgttcgttcaactcacagagtttaacctttcttttcatagagcagttaggaaacactctgttgctaaattctgtaagtggatattctgacatcttgtggccttcgttggaaacgggatttcttcatattctgctagacagaggaattctcagtaacttccttgtgttgtgtgtattcaactcacagagttgaacgatcctttacacagagcagacttgaaacactctttttgtggaatttgcaagtggagatttcagccgctttgagttcaatggtagaataggaaatatcttcctatagaaactacacagaatgattctcagaaactcgtttgtgatgtgcgcgttcaactcacagagttcaacctttcttttcatagagcagttgggaaacactctgtttgtaaagtctgcaagtggatattcagacttctttgaggccttcgttggaagcgggatttcttcatattctgctagacagaagaattcccagtaacttccttgtgttgtgtgtgttcaactcacagagttgaactttcatttacacagagcagatttgaaacactctttttgtggaatttgcaagtggagatttcaagcgctttgaggacaaaggcagaaaaggaaatatcttcgtataaaaactagacagaatcattctcagaaactgctgcgtgatgtgtgctttcaactctcagagtttaacttttcttttcattcagcggtttggaaacactctgtttgtaaagtctgcacgtggaaattttgaccacttagaggccttcgttggaaacgggtttttttcatgtaaggctagacagaagaattcccagtaacttccttctgttgtgtacattcaactcacagagttgaacgttcccttagacagagcagatttgaaacactctttttgtgcaattggcaagtggtgatttcagccgctttgaggtcaatggtagaaaaggaaatatcttcgtataaaaactagacagaatcattcccacaaactgcattgtgatgtgttcgttcaactcacagagtttaacctttccgttcatagagcagtcaggaaacacactgtttgtaaagtctctaagtggatattctgacatcttgtggccttcgttggaaacgggatttcttcatattctgctagacagaagaattctcagtaacttccttgtgttgtgtgtattcaactcacagagttgaacgatcctttacacagagcagacttgaaacactctttttgtggaatttgcaagtggagatttcagcagctttgaggtcaatggtagaaaaggaaatatcttcgtataaagactagacagaatgattctcagaaactcctttgtgatgtgtgtgttcaactcacagagtttaacttttcttttcatagagcagttaggaaacactctgtttgtaaagtctgcaagtggatattcagacctctttgaggccttcgttggaaacgggatttcttcatattatgctagacagaagaattctcagtaacttccttgtgttgtgtgtattcaactgacagagttgaactttcatttagagagagcagatttgaaacactgtttttgtggagtttgcaagtggagatttcaagcgcttttgggccaaaggcagaaaaggaaatatcttcgtataaaaactagacagaatcattctcagaaactgctgcgtgatgtgtgcgttcaactctcagagtttaacttttcttttcattcagcagtttggaaacactctgtttgtaaagtctgcacgtggaaattttgaccacttagaggccttcgttggaaacgggtttttttcatgtaaggctagacagaagaattcccagtaacttccttgtgttgtgtgcattcaactcacagagttgaacgttcccttagacagagcagatttgaaacactctatttgtgcaatttgcaagtgtagttttcaagctctttaaggtcaacggcagaaaaggaaatatcttcgtttcaaaactagacagaatcattcccacaaactgcgttgtgaagtgctcgttcaactcacagattttaaactttctgttcatagagcagttaggaaacactctgtttgtaaagtctgtaagtggatattctgacatcttgtggccttcgttggaaacggaatttcttcatattctgctagacagaagaattctcagtaacttccttgtgttgtgtgtattcaactcacagagttgaacgatcctttacacagaggagacttgaaacactccttttgtggaatttgcaagtggagatttcagccgctttgaggtcaatggtagaataggaaatatcttcctatagaaactagacagaatgattctgagaaatcctttgtgatgtgtgcgttcaactcacagagtttaacctttcttttcatagagcagttaggaaacactctgtttgtaaagtctgcaagtggatattcagacctccttgaggccttcgttggaaacgggatttcttcatattatgctagaaagaagaattcccagtaacttccttgtgttgtgtgtgttcaactcacagagttgaactttcatttacacagagcagattggaaacactctttttgtggaatttgcaagtggagatttcatgcgctttgaggccaaaggcagaaaaggaaatatcttcgtataaaaactagacagaatcattctcagaaactgctctgcgatgtgtgcgttcaactctcaagagtttaacttttcttttcattcagcagtttggaaacactctgtttgtaaagtctgcacgtggataacttgaccacttagaggacttcgttggaaacgggtttttttcctgtaaggctagacagaagaattcccagtaacttccttgtgttgtgtacattcaactcacagagttgaacgttcccttagacagagcagatttgaaacactctttttgtgcaattggcaaatggagatttcaagcgctttaaggtcaatggcaggaaaggaaatatcttcgtttcaaaactagacagaataattcccacaaactgcgttgtgatgtgttcgttcaactcacagagtttaacctttcttttcatagagcacttaggaaacagtctgtttgtaaattctgtaagtggatattctgacatcttgtggccttcgttggaaacgggatttcttcatattctgctagacagaagaattctcagaaacttccttgtgttgtgtgttttcaactcacagagttgaacgatgctttacacagagtagacttgaaacactctttttgtgtaatttgcaagtggagatttcagccgccttgaggtcaatggtagaaaaggaaatatcttcgtataaaaactagacagaaatgattctcagaaactcctttgagatgtgtgtgttcaactcacagagtttaacctttcttttcatagagcagttaggaatcactctgtttgtaaagtctgcaggtggatattcagacctctttgaggccttcgttggaaacgggtttttttcatataaggctagagagaagaattctcagtaacttccttgtgttgtgtgtattcaactgacagaattgaactttcatttagagagagcagatttgaaacactgtttttgtggaatttgcaattggagatttcaagcgctttggggccaaaggcagaaaaggaaatatcttcgtataaaaagtagacagaatcattctcagaaactgctgcgtgatgtgtgcgttcaactctcagagtttaacttttctttccattcagcggtttggaaacactctgtttgtaaagtctgcacgtggatattttgaccacttagaggccttcgttggaaacgggtttttttcatgtaaggctagacagaagaattcccagtaacttccttgtgttgtgtacattccactcacagagttgaacgttcccttagacagagcagatttgaaacactctttttgtgcaattggcaagtggagatttcaagcgctttaaggtcaatggcagaaaaggaaatatcttcgtttcaaaactagacagaatcattcccacaaactgcgttgtgatgtgttcgttcaactcacagagtttaacctttctgttcatagagctgttaggaaacactctgtttgtaaagtctgtaagtggatattctgacatcttgtggccttcgttggaaacgggatttcttcatattctgctagacagaataattctcagtaacttccttgtgttgtgtgtattcaactcacagagttgaaggatcctttacagagagcaggcttgaaacactctttttgtcgaatttgcaagtggagatttcagccgctttgaggtcaatggtagaataggaaatatcttcttatacaaactagacagaatgattctcagaaactcctttgtgatgtgtgtgttcaactcacagagtttaacctttcttttcatagagcagttaggaaacactctgtttctaaagtctgcaagtggatattcagacctctttgaggccttcgttggaaacgggtttttttcatataaggctagacagaagaattcccagtaacttccatgtgttgtgtgtgttcaactcacagagttgaactttcatttacacagagtagatttgaaacactctttttgtggaatttgcaaatggagatttcaaactctttgaggccaaaggcagaaaaggaaatatcttcgtataaaaactagacagaatcattctcagaaactgctctgcgatgtgtgcgttcaactctcagagtttaacttttcttttcattcagcagtttggaaacactctggttgtaaagtctgcacgtggatattttgaccacttagaggccttcgttggaaacgggtttttttcctgtaaggctagacagaagaattcccagtaacttccttgtgttgtgtgcattcaactcacagagttgaacattcccttagacagagcagatttgaaacactctatttgtgcaatttgcaagtgtagatttcaagcgctttaaggtcaatggcagaaaaggaaatatcttcgtttcaaaactagacagaatcattcccacaaactgcgttgtgatgtgttcgttcaagtcacagagtttaacttttctgttcatagagcagttagaaaacactctgtttgtaaagtctgcaagtggatattcagacctccttgaggccttcgttggaaacgggatttcttcatattctgctagacagaaagaattctcagtaacttccttgtgttgtgtgtattcaactcacagagttgaacgatcctttacacagagcagacttgtaacactctttttgtggaatttgcaagtggagatttcagccgctttgaagtcaaaggtagaaaaggaaatatcttcctataaaaactagacagaatgattctcagaaactcctttgtgatgtgtgcgttcaactcacagagtttaacctttcttttcatagagcagttaggaaacactctgcttgtaaagtctgcaagtggatattcagccctctttgaggccttcgttggaaacgggttttttttatataaggctagacagaagaattctcagtaacttccttgtgttgtgtttattcaactcacagagttgaatgatcctttacacagagcagaattgaaacactctttttgtggaatttgcaagtggagatttcagccgctttgaggtcaacggtagaaaagtaaatatcttcgtataaagactagacagaatcattctcagaaactgctctgcgatgtgtgcgttcaactctcagagtttaacttttcttttcattcagcagtttggaaacactctgtttgtaaagtctgcacgtggataatttgaccacttagaggccttcattggaaacgggtttttttcctgtaaggttagacagaagaattcccagtaacttccttgtgttgtgtacattcaactcacagagttgaacgttcccttagacagagcagatttgaaacactctttttgtgcaattggcaaggggagatttcaagcgctttaaggtcaatggcagaaaaggaaatatcttcgtttcaaaactagacagaatcattcccaaaaactgcgttgtgatgtgttcgttcaactcacagagtttaacctttcttatcatagagcagttgggaaacagtctgtttgtaaattctgtaagtggatattctgacatcttgtggtcttcgttggaaacgggatttcttcatattctgctagacagaataattctcagtaacttccttgtgttgtgtgtattcaactcacagagttgaacgatcctttacagagatcaggattgaaacactctttttgtcgaatttgcaagtggagatttcagccgctttgaggtcaatggtagaataggaaatatcttcttatagaaactagacagaatgattctcagaaactcttttgtgatgtgggtgttcaactcacagagtttaactttcttttcatagagcagttaggaaacactctgtttataaagtctgcaagtggatattttcacctctttgaggccttcgttggaaacgggttttttttcatgtaaggctagacagaagcattctcagaaactgctctgcgatgtgtgcgttcaactctcagagtttaacttttcttttcattcagcagtttggaaacactctgtttgtaaagtctgcacgtggatattttgaccacttagaggccttcgttggaaacgggtttttttcctgtaaggctagacagaagaattcccagtaacttccttgtgttgggtgcattcaactcacagagttgaacgttccttagacacagcagatttgaaacactctatttgtgcaatttgcaagagtagattccaagcgctttaaggtcaatggcagaaaaggaaatatcttcgtttcaaaactagacagaatcattcccacaaactgcgttgtgatgtgttcgttcaactcacagagtttaacctttcttttcatagaccagttaggaaacagtctgtttgtaaattctgtaagtggatattctgacatattgtggccttcgttggaaacgggatttcttcatattctgctagacagaagaattctcagtaacttccttgtgttgtgtgtattcaactcacagagttgaacgatcctttacacagagcagacttgaaacactctttttgcggaatttgcaagtggagatttcagccgctttgaggtcaatggtagaataggaaatatcttcctatagaaactagacagaatgattctcagaaactcctttgtgatgtgtgggttcaactcacagagtttaacctttcttttcatagagcagttaggaaacactctgtttgtaaagtctgcaagtggatattcagacctctttgaggccttcgttggaaacgggattttttcatataaggctagacagaagaattcccagtaacttccttgtgttgtgtgtgttcaactcacagaattgaactttcatttacacagagcagatttgaaacactctttttgtggaatttgcaaatggagatttcaagcgctttgaggccaaaggcagaaaaggaaatgtcttcgtttcaaaactagacagaatgattctcagaaactgctctgcgatgagtgcgttcaactctcagagtttaacttttcttttcattcagcagtttggaaacactctgtttgtaaagtctgcacgtggatattttgaccacttagaggccttcgtcggaaacgggtttttttcatgtaaggctatagagaagaattcccagtaacttccttgtgttgtgtacattcaactcacagagttgaacgttcccttagacagagcagatttgaaacactctttttgtgcaattggcaagtggtgatttcaaccgctttgaggtcaatggtagaaaaggaaatatcttcgtataaaaactagacagaatcattcccacaaactgcgttgtgatggttcgttcaactcacagagtttaacctttcttttcatagagcagttaggaaacagtctgtttgtcaattctgtaagtggatattctgacatcttgtggccttcgttggaaacgggatttcttcatattttcctagacagagtaattctcagtaacttccgtgtgttgagtgtattcaactcagagagttgaacgatcctttacagagagcagacttgaaacactctttttgtggaatttgcaagtggagatttcatccgctttgaggtcaatggtagaaaaggaaatatcttcgtataaagactagacagaatgattctcagaaacttctttgtgatgtgtgcgttcaactcacagagtttaacctttcttttcatagagcagttaggaaacactctgtttgtaaactctgcaagtggatattcaaacctctttgaggccttcgttggaaacgggatttcttcatactgtgctagacagaagaattctcagtaacttccttgtgttgtgtgtattcaactgacagagttgaactttcatttagagagagtagttttgaaacactgtttttgtggaatttgcaagtggagatttcaagcgctttggggccaaaggcagaaaaggaaatatcttcgtataaaaactagacagaatcattctcagaaactgctgcgtgatgtgtgcgttcaacactcagagtttaacttttcttttcattcagcggtttggaaacactctgtttgtaaagtctgaacgtgcatattttgaccacttagaggccttcgttggaaacgggtttttttcatgtaaggctagacagaagaattctcagtaacttccttgtgttgtgtttattcaactcacagagttgaatgatcctttacacagagcagatttgaaacactctatttgtgcaatttgcaagtgtagatttcaagcgctttaaggtcaacggcagaaaaggaaatatcttcgtttcaaaactagacagaatcattcccacaaactacgttgtgatgtgttcgttcaactcacagagtttaacctttcttttcatagagcagttaggaaacagtctgtttgtcaattctgtaagtggatattctgacatcttgtggccttcgttggaaacgggatttcttcatattctgctagacagaagaattctcagtaacttccttgtgttgtgtgtattccactcacagagttgaacgatcctttacacagagcagacttgtaacactctttttgtggaattttcaagtggagatttcagccgctttgaagtcaaagttagaaaaggaaatatcctcctataaaaactagacagaatgattctcagaaactcctttgtgatgtgtgtgttcaactcacagagtttaacgtttcttttcatagagcagttagtaaacactctgtttatgaagtctgcaagtggatattcagacctctttgaggtcttcgttggaaacgggatttcttcatattatgctagacagaagaattctcagaaacttccttgtgttgtgtgttttcaactcacagagtacaacgatcctttacacagagtagacttgaaacactctttttgtggaattggcaagtggagatttcagccgctttgaggtcaatggtagaaaaggcaatatcttcgtataaaaactagacagaatcattctcagaaactgctctgcgatgtgtgcgttcaactctcagtgtttaacttttcttttcattcagcagtttggaaacactctgtttgtaaagtctgcacgtggatattttgaccacttagaggccttcgttggaaacgggtttttttcctgtaaggctagacagaagaattcccagtaacttccttgtgttgtgagcattcaactcacagagttgaacgttcccttagaccgagcagatttgaaacactctatttgtgcaatttgcaagtgtagttttcaagctctttaaggtcaacggcagaaaaggaaatatcttcgtttcaaaactagacagaatgattctcagaaactcctttgtgatgtgtgcgttcaactcacagagtttaacctttcttttcatagagcagttaggaaacagtctgtttgtcaattctgtaagtggatattctgacatcttgtggccttcgttggaaacgggatttcttcatattctgctagacagaagaattctcagtaacttccttgtgttgtgtgtattcaactcacagagttgaacgatcctttacacagagcagacttgaaacactctttttgtggaatttgcaagtggagatttcagccgctttgagttcaatggtagaataggaaatatcttcctatagaaactagagagaatgattctcagaaactcctttgtgatgtgtgtgttcaactcacagagttgaacctttcttttcatagagcagtaagtaaacactctgtttataaagtctgcaagtggatattcagacccctttgaggccttcgttggaaacgggatttcttcatattatgctagacagaagaattctcagtaacttccttgtgttgtgtgtattcaactgacagagttgaactttcatttagacagagcagatttgaaacactctttttgtggaatttgcaagtggagatttcaagcgctttgaggccaaagtcagaaaaggaaatatcttcgtataaaaactagacagaatcattctcagaaactgctctgcgatgtgtgcgttcaactctcacagtttaacttttcttttcattcagcagtttggaaacactctgtttgtaaagtctgcacgtggataatttgaccacttagaggccttctttggaaacgggtttttttcatataaggctagacagaagaattcccagtaacttccttgtgttgtgtacattcaactcacagagttgaacgttcccttagacagagcagatttgaaacactctttttgtgcaattggcaaatggagatttcaagcgctataagttcaatggcagaaaaggaaatatcttcgtttcaaaactagacagaatgattctcacaaactcctttgtgatgtgtgcgttcaactcacagagtttaacctttcttttcatagagtagttaggaaacactctgtttgtaaagtctgcaagtggatattcagacctgtttgaggccttcgttggaaacgggatttcttcatactgtgctagacagaagaattctcagaaacttccttgtgttgtgtgtattcaactcacagagttgaacgacgctttacacagagcagacttgaaacactctttttgtggaatttgcaagtggggatttcagccgctttgaggtcaatggtagaatagggaatatcttcctatagaaactagacagaatgattctcagaaactcctttgtgatgtgtgcgttcaactcacagagtttaacttttcttttcatagagcagttaggaaacactctgtttgtaaagtctgcaagtggatattcagacctctttgaggccttcgttggaaacgggatttcttcattttctgctagacagaagaattctcagtaacttccttgtgttgtgtgtattcaactgacagagttgaactttcatttagagagagcagatttgaaacactgtttttgtggaatttgccagtggagatttcaagcgctttggggccaaaggcagaaaaggaaatatcttcgtataaaaactagacagaatcattctcagaaactgctgcgtgatgtgtgcgttcaactctcagagtttaactttccttttcattcagcggtttggaaacactctgtttgtaaagtctgcacgtggatattttgaccacttagaggccttcgttggaaacgggtttttttcatgtaaggctagacagaagaattcccagtaacttccttgtgttgtgtacattcaactcacagatttgaacgttcccttagacagagcagatttgaaacactctttttgtgcaattggcaaatggagatttcaagcgctttaaggtcaatggcagaaaagggaatatcttcgtttcaaaactagacagaatgattgtcataaactcctttgtgatgtgtgcgttcaacacacagagtttaacctttctgttcatagagcagttaggaaacattctgtttgtaaagtctgtaagtggatattctgacatcttgtggccttcgttggaaacgggatttcttcatattctgttagacagaagaattctcagaatcttccttctgttgtgtgtattcaactcagagagttgaatgatcctttacacagagcagacttgaaccactctttttgtggaatttgcaagtggagattacagccgctttgaggtccatggtagaaaaggaaatatcttcgtataaaaactagacagaatgattctcagaaacttctttgtgatgtgtgcgttcaactcacagagtttaacctttcttttcatagagcagttgggaaacactctgtttttaaagtctgcaagtggatattcagacctactttgaggccttcgttggaaacgggtttttttcatgtaaggctagacagaagaattcccagtaacttccttgtgttgtgtgtgttcaactcacaggagttgaactttcatttacacagagcagatttgaaacactctttttgtggaatttgcaagtggagatttcaagcgctttgaggccaaaggcagaaaaggaaatatcttcgtttcaaaactagacagaatgattctcagaaactgctctgcgatgtgtgcgttcacctctcagagtttaacttttcttttcattcagcagtttggaaacactctgtttgtaaagtctgcacgtgcataatttgaccacttagaggccttcgttggaaacgggtttttttcatgtaaggctagacagaagaattcccagtaacttccttgtgttgtgtgcattcaactcacagagatgaacgttcccttagacagagcagatttgaaacactctatttgtgtaatttgcaagtgtagatttcaagcgctttaaggtcaatggcagaaaaggatatatctccgtttcaaaactagacagaatcattcccacaaactgcgttgtgatgtgttcgttcaactcacagagtttaacctttctgttcttagagcagttaggaaacactctgtttgtaaagtctgtaagtggatattctgacatcttgtggccttcgttggaaacgggatttctttatattctgctagacagaagaattctcagcaacttccttgtgttgtgtgtattcaactcacagagttgaacgatcctttacacagagcagacttgaaacactctttttgtggaatttgcaagtggagatttcagccgctttgaggtcaatggtagaataggaaatatcttcctatagaaactagacagaatgattctcagaaactcctttgtgatgtgggcgttcgaactcacagagtttaacctttcttttcatagagcagttaggaaacactctgtttgtaaagtctgcaagtggatattcagacatctttgaggctttcgttggaaactggatttcttcatattctgctatacagaagaattcccagtaacttccttgtcttgtgtgtgttcaactcccagagttgaactttcatttacacagagcagatttgaaacactctttttgtggaatttgcaagtggagatttcaagcgctttgaggccaaaggcagaaaaggaaatatcttcgtttcaaaactagacagaatcattctcagaaactgctgcgtgatgtgtgcgttcaactctcagagtttaacttttcttttcattcagcggtttggaaacactctgtttttaaagtctgcacgtggatattttgaccacttagaggccttcgttggaaacgggttttttttcatgtaaggctagacagaagaattctcagtaacttccttgtgttgtgtgtattcaactcacacagttgaacgatcctttacacagagcagacttgtaacactctttttgtgggatttgcaagtggagatttcagccgctttgaagtcaaaggtagaaaaggaaatatcttcctataaaaactagacagaatcattcccacaaactgcgttgtgatgtgttcgttcaactcacagagtttaacctttctgttcatagagcagttaggaaacactctgtttgtaaagtctgcaagtggatattcagacctctttgaagccttcgatggaaacgggatttcttcatattctgctagacagaagaattctcagtaacttcgtggtgttgtgtgttttcaactcacagagttgaatgatcctttacacagaacagtcttgaaacactctttttgtggaatttgcaagtggagatttcagccgctttgaggtcaatggtagaataggaaatatcttcctatagaaactagacagaatgattctcagaaactcctttgtgatgtgtgcgttcaactcacagagtttaacctttcttttcatagagcagttaggaaacactctgtttgtaaagtctgcaagtggatattcagacctctttgaagccttcgttggaaacgggatttcttcatattctgctagacagaagaattctcagtaacttccttgtgttgtgtgtattcaactcacagagttgaacgaacctttacacagagcagacttgaaacactctttttgtggaatttgcaagtggagatttcagccgctttgaggtcaattgtagaaaaggaaatatcttcgtagaaaaactagacagaatcattctcagaaactgctctgcgatgtgtgcgttcaactctcagagtttaacttttcttttcattcagcagtttggaaacactctgtttgtaaagtctgcacgtggataatttgaccacttagaggacttcgttggaaacgggtttttttcatgtaaggctagacagaagaattctcagtaacttccttgtgttgtgtgtattcaactcacagagttgaacgttcccttagacagagcagatttgaaacactctttttgtgcaattggcaagtggagatttcaagcgctttaaggtcaatggcagaaaaggaaatatcttcgtttcaaaactagacagaatgattctcagaaacttctttgtgatgtgtgcgttcaactcacagagtttaacctttcttttcatagagcagttaggaaacactctgtttgaaaactctgcaagtggatgttcagacctctttgaggccttcgttggaaacgggatttcttcatactatgctagacagaagaattctcagtaacttccttgtgttgtgtgtattcaactcacagagttgaacgatcctttacacagagcagacttgtaacactctttttgtggaatttgcaagtggagatttcagccgctttgacgtcaaaggtagaaaaggaaatatcttcctataaaaactagacagaatgattctcagaaactcctttgtgatgtgtgtgttcaactcacagagtttaacctttcttttcatagagcagttagtaaacactctgtttataaagtctgcaagtggatattcagacccctttgaggccttcgttggaaacgggttttcttcatattctgctagacagaagaattctcagtaacttcccttgtgttgtgtgtattcaactcacagaattgaatgatcctttacacagagcggacttgaaacactctttttgtggaatttgcaagtggagatttcagccgttttgagttcaatggtagaataggaaatatcttcctatagaaactagacagaatcattctcagaaactgctctgcgatgtgtgcgttcaactctcagagtttaacttttcttttcattcagcagtttggaaacactctgtttgtaaagtctgcacgtggatattttgaccatttagaggccttcgttggaaacgggtttttttcttgtaaggctagacagaagaattcccagtaacttccttgtgttgtgtacattcaactcacagagttgaacgttcccttagacagagcagatttgaaacactctttttgtgcaattggcaagtggtgatttcagcctctttgaggtcaatggtagaaaaggaaatatcttcgtataaaaactagacagaacgattctcagaaactcctttgtgatgtgtgcgttcaactcacagagtttaacttttcttctcatagagcagttaggaaacactctgtttgtaaagtctgcaagtggatattcagacctctttgaggccttcgttggaaacgggatttcttcatattttgctagacagaagaattctcagtaacttccttgtgttgtgtgtattcaactcacagagttgaacgatctcttacacagagcagagttgaaacactctttttctggaatttgcaagtggagatttcagccgctttgaggtcaatggtagaataggaaatatcttcctatagaaactagacagaatgattctcagaaactcctttgtgatgtgtgcgttcaactcacagagtttaacctttcttttcatagagcagttaggaaacactctgtttgtaaagtctgcaagtggatactcagacctctttgaggccttcgttggaaacgggtttttttcatataaggctagacagaagaattcccagtaacttccttgtgttgtgtgtgttcaactcacagagttgaactttcatttacacagagcagatttgaaacactctttttgtggaatttgcaaatggagatttcaagcgctttgaggccaaaggcagaaaaggaaatgtcttcgtttcaaaagtagacagaatcattctcagaaactgctctgcattgtgtgtgttcaactctcagagtttaacttttcttttcattcagcagtttgaaaacactctgtttgtaaagtctgtacgtggataatttgaccacatagaggccttcgttggaaacgggtttttttcatgtaaggctagacagaagaattctcagtaacttccttgtgttgtgtgtattcaactcacagagttgaacgatcctttacacagagcagacttgtaacactctttttgtggaatttgcaagtggagatttcagccgctgtgaagtcagaggtagaaaaggaaatatcttcctataaaaactagacagaatcattcccacaaactgcgttgtgatgtgttcgttcaactcacagagtttaacctttccgttcatagagcagttaggaaacactctgtttgtaaagtctgtaagtggatattgtgacatcttgtggccttcgttggaaacgggatttcttcatattctgctagacagaagaattctcagtaactgccttgtgttgtgtgtattcaactcacagagttgaacgatcctttacacagagcagacttgaaacactccttttgtggaatttgcaagtggagatttcagccgctttgaggtcaatggtagaataggaaatatcttcttatagaaactagacagaatgattctcagaaactcctttgtgatgtgtgcattcaactcacagagtttaacctttcttttcatagagtagttaggaaacactctgtttgtaaagtctgcaagtggatattcagacctccttgaggccttcgttggaaacgggatttcttcatattatgctagacagaagaattctcagtaacttccttgtgttgtgtgtattcaactgacagagttgaactttcatttagacagagcagatctgaaacactctttttgtggaatttgcaagtggagatttcaagcgctttgaggccaaaggccgaaaaggaaatatcttcgtataaaaactagacagaatcattctcagtaactgctctgcgatgtgtgcgttcaactctcagagtttaacttttcttttcattcagcagtttggaaacactctgtttgtaaagtctgcacgtggatattttgaccacttagaggccttcgttggaatcgggtttttttcctgtaaggctagacagaagaattcccagtaacttacttgtgttgtgtacattcaactcacagagttgaacgttcccttagacagagcagatttgaaacactctttttgtgcaattggcaagtggtgatttcagctgctttgaggtctatggtagaaaagggaatatcttcgtataaaaactagacagaatgattctcagaaactcctttgtgatgtgtgcgttcaactcacacagtttaacctttcttttcatagagcagttagaaaacactctgtttgtaaagtctgcaagtggatattcagacctccttgaggcattcgttggaaacgggatttcttcatattatgctagacagaagaattctcagtaacttccttgtgttgtgtgtattcaactcacagagttgaacgatcctttacacagagcagacttgaaacactctttttgtggaatttgcaagtggagatttcagccgctttgaggtcaatgttagaataggaaatatcttcctatagaaactagacagagtgattctcagaaactcctttgtgatgtgtgcgttcaactcacagagtttaacctttcttttcatagagcagttaggaaacactctgtttgtaaagtctgcaagtggatattcagagctccttgaggccttcgttggaaacgggatttcttcatattctgctatacagaataattctcagtaacttccttgtgttgtgtgtattcaactcacagagttgaacaatcctttacacagagcagacttgaaacattctttttgtggaatttgcaagtggagatttcagccgctttgaggtcaatggtagaataggaaatatcttcctatagaaactagacagaatcattctcagaaactgctctgtgatgtgtgcgttcaactcacagagtttaacttttcttttcattcagcagtttggaagcactctgtttgtatagtctgcaagtggatatattgaccactttgaggccttcgttggaaacggttttttttcatgtaaggctagacagaagaattcccagtaacttccttgtgttgtgtacattcaactcacagagttgaacgttcccttagagagagcagatttgaaatactctttttgtgcaattggcaagtggagatttcaagcgctttaaggtcaatggcagaaaaggaaatatcttcgtttcaaaactagacagaatcattcccacaaactgcgttgtgatgtgttcgttcaactcacagagtttaacctttcttttcatagagcagttaggaaacactctgttggtaaattctgtaagtggatattctgacattttgtggccttcgttggaaacgggatttcttcatattctgctagacagaagaatgctcagtaacttccttgtgttgtgtgtattcaactcacagagttgaacgatcctttacacagagcagacttgaaacactctttttgtggaatttgcaagtggagatttcagccgctttgaggtcaatggtagaaaaggaaactatcttcatataaagattagacagaatgattctcagaaactcctttgtgatgtgtgtgttcaactcacagagtttaacctttcttttcatagagcagttaggaaacactctgtttgtaaagtctgcaagtggatattctgacctctttgaggccttcgttggaaacgggtttttttcatataaggctagacagaagaattctcagtaacttccttgtgttgtgtgtattcaaatgacagagttgaatttcatttagagagagcagatttgaaacactgtttttgtggaatttgcaagtggagatttcaagcgctttggggccaaaggcagaaaaggaaatatcttcgtataaaaactagacagaatcattctcagaaactgctgcgtaatgtgtgcgttcaactctcagagtttaacttttcttttcattcagcggtttggaaacactctgtttgtaaagtctgcacgtggatattttgaccacttagaggccttcgttgaaaacgggattttttcatgtaaggctagacagaagaattcccagtaacttccttgtgttgtgtgcattcacctcacagagctgaacgttcccttagacagagcagatttgaaacactctatttgtgcaatttgcaagtgtagatttcaagcgctttaaggtcaatggcagaaaaggaaatatcttcgtttcaaaactagacagaatgattctcagaaactcctttctgacgtgtgcgttcaactcacagagtttaacctttcttttcatagagcagttaggaaacactctgtttgtaaagtctgaaagtggatattcagacctctttgaggccttcgttggaaacgggatttcttcatattatgcctgacagaagaattctcagtaacttaccttgtgttgtgtgtattcaactcacagagttgaacgatcctttacacagagcagacttgaaacactctttttctggaatttgcaagtggagatttcagccgctttgaggtcaatggtagaataggaaatatcttcttatagaaactagacagaatgattctcagaaactcctttgtgatgtgtgcgttcaactcacagagtttaacttttcttttcatagagcagttaggaaacactctgtttgtaaagtctgcaagtggatattcagacctctttgaggccttctttggaaacgggatttcttcatattatgctagacagaagaattcccagtaacttccttgtgttgtgtgtgttcaactcacagagttgaactttcatttacacagagcagatttgaaacactctttttgtggaatttgcaaatggagatttcagccgcgttgaggtaaatggtagaaaaggaaatatcttcgtttcaaaactagacagaatcattctcagaaactgctctgcgatgtgtgcgttcaactctcagagtttaacttttcttttcattcaacagtttggaaacactctgtttgtaaagtctgcacgtggatattttgaccacttagaggccttcgttggaaacgggtttttttcctgtaaggctagacagaagaattcccagtaacttccttgtgttgtgtgcattcaactcagagagttgaacgttcccttagacagagcagatttgaaacactctatttgtgcaatttgcaagtgtagttttcaagctctttaaggtcaatggcagaaaaggaaatatcttcgtttcaaaactagacagaatgattctcagagactcctttgtgatgtgtgcgttcaactcacagagtttaacctttcttttcatagagcagttgggaaacactctgtttgtaaagtctgcaagtggatattcagacatccttgaggctttcgttggaaacgggatttcttcatattctgctagaaagaaaaattctcagtaacttccttgtgttgtgtgtattcaactcacagaattgaacgatcctttacacagagcagacttgaaacactctttttgtggaatttgcaagtggagatttcagccgctttgaggtcaatggtagaaaaggaaatatcttcgtataaagactagacagatagattctcagaaactcctttgtgatgtgtgcgttcaactcacagagtttaacctttcttttcatagagcagttaggaaacactctgtttgtaaagtctgcaagtggatattcagccctctttgaggccttcgttggaaacgggtttttttcatataaggctagacagaagaattctcagtaacttctttctgttgtgtgtattcaactgacagagttgaactttcatttagagagagcagatttgaaacactgtttttgtggaatttgcaagtggagattataagcgctttggggccaaaggcagaaaaggaaatatcttcgtataaaaactagacagaatcattctcagaaactgctctgtgatgtgtgcgttcaactctcagagtttaacttttcttttcattcagcagtttggaaaccctctgtttgtaaagtctgcacgtggatattttgaccacttagaggccttcgttggaaacgggtttctttcctttaaggctagacagaagaattctcagtaacttccttgtgttgtgtgcattcaactcacagagttgaacgttcccttagacagagcagatttgaaacagcctatttttgcaatttgcaagtgtagatttcaagcgctttaaggtcaacggctgaaaaggaaatatcttcctttcaaaactagacagaatcattcccacaaactgcgttgtgatgtgttcgttcaactcacagagtttaagctttctgttcatagagcagttaggaaacactctgtttgtaaagtctgtaagtggatattctgacatcttgtggccttcgttggaaacgggatttcttcatattctgctagacagaagaattctcaggaacttccttgtgttgtgtgttttcaactcacagagttgaacgatcctttacacagagcagacttgaaacactcttttggtggaatttgcaagtggacatttcagccgctttgaggtcaatggtagaaaaggaaatatcttcgtataaaaactagacagaatgattctcagaaactcctttgtgatgtgtgcgttcaactcacagagtttaacctttcttttcatagagcagttgggaaacactctgtttgtaaagtctgcaagtggatattcagacttctttgaggccttcgttggaagcggggtttcttcatattctgctagacagaagaattctcagtaacttccttgtgttgtgtgtattcaactcacagaattgaacgatcctttacacagagcagacttgaaacactctttttgtggaatttgcaagtggagatttctgccgctttgaggtcaatggtagaaaaggaaatatcttcgtataaaaactagacagaatcattctaagaaactgctctgcgatgggtgtgttcaactctcagagtttaacttttcttttccttcagcagtttggaaacactctgtttgtaaagtctgcacgtggataatttgaccacttagaggccttcgttggaaacgggtttttttcatgtaagtctagacagaagaattcccagtaacttccttgtgttgtgtacattcaactcacagagttgaacgttcccttagacagagcagatttgaaatactctttttgtgcaattggcaagtggagatttcaagcgctttaaggtcaatggcagaaaaggaaatatcttcgtttcaaaactagacagaatcattcccacaaactgcgttgtgatgtgttcgttcaactcacagagtttaacctttcttttcatagagcagttaggaaacactctgttggtaaattctgtaagtggatattctgacatcttgtggccttcgttggaaacaggatttcttcatattctgctacacagaagaattctcagtaacttccttgtgttgtgtgtattcaactcacagagttgaacgatcctttacacagagcagacttgtaacactctttttgtggaatttgcaagtggagatttcagccgctttgaagtcaaaggtagaaaaggaaatatcttcctataaaaaatagacagaaatgattctcagaaacttctttgtgatgtgtgcgttcaactcacagagtttaacctttcttttcatagagcagttaggaaacactctgtttgtaaactctgcaagtggatattcagacctctttgaggccttcgttggaaacgggatttcttcatactatgctagacagaagaattcccagtaacttccttgtgttgtgtgtgttcaactcacagcagttgaactttcatttacacagagcagatttgaaacactctttttgtggaatttgcaagtggagatttcaagcgctgtgaggccaaaggcagaaaaggaaatatcttcgtataaaaactagacagaatcattctcagaaagtgctctgcgatgtgtgcgttcaactctcagagtttaactttgcttttcattcagcagtttggaaacactctgtttgtaaagtctgcacgtggataatttgaccacttagaggccttcgttggaaacgggtttttttcatgtaaggctagacagaagaattcccagtaacttccttgtgttgtgtacattcaactcacagagttgaacgttcccttagacagagcagatttgaaacactctttttgtgtaattggcaaatggagatttcaagcgctttaaggtcaatggcagaaaaggaaatatcttcgtttcaaaactagacagaagcattcccacaaactgcgttgtgatgtgttcgttcaactcacagagtttaacctttcttttcatagagcagttaggaaacagtctgtttgtgaattctgtaagtggatattctgacatcttgtggccttcgttggaaacgggatttcttcatattctgctagacagaagaattctcagaatcttccttgtgttgtgtgtattcaactcacagagttgaacgatggtttacacagagcagatttgaaacactctttttgtggaattttcaagtggagatttcagccgctttgaggtcaatggtagaaaaggaaatatcttcgtataaaaactagacagaatgattctcagaaacttctttgtgatgtgtgcgttcaactcacagagtttaacctttcttttcatagagcagttaggaaacactgtgtttttaaactgtccaagtggatattcagacctctttgaggccttcgttggaaacgggatttcttcatactgtgctagacagaagaattcccagtaacttccttgtgttgtgtgtgttcaactcacagagttgaactttcatttacacagagcagatttgaaactctctttttgtggaatttgcaaatggagatttcaagcgctttgaggccaaaggcagaaaaggaaatgtcttcgtttcaaaactagacagaatcattctcagaaactgctctgcgatgtgtgcgttcaactctcagagtttaacttttcttttcattcagcagtttggaaacactctgtttgtaaagtctgcacgtggataatttgaccacttagaggccttcattggaaacgggtttttttcatgtaaggctagacagaagaattcccagtaacttccttgtgttgtgtgcattcaactcacagagttgaacgttcccttagacagagcagagttgaaacactctatttgtgcaatttgcaagtgtagatttcaagcgctttaaggtcaatggcagaaaaggaaatatcttcgtttcaaaactagacagaatgattctcagaaactcctttgtgatgtgtgcgttcaactcacacagttcaacctttcttttcatagagcagttgggaaacactctgtttgtaaagtctgcaagtggatattcagacttctctgaggccttcgttggaagcgggatttcttcatgttctgctagacagaagaattctcagtaactgccttgtgttgtgtgtattcaactcacagagttgaacgatcctttacactcagcagacttgaaacactctttttgtggaatttgcaagtggagatttcagccgctttgaggtcaatggtagaataggaaatatcttcctatagaaactagacagaatgattctcataaactcctttgtgatgtgtgcattcaactcacagagtttcacctttcttttcatagagcagttaggaaacactctgtttgtaaagtctgcaagtggatattcagacctccttgaggtcttcgttggaaacgggatttcttcatattctgctagatagaagaattctcagtaacttccttctgttgtgtgtattcaactcacagagttgaacgatcctttacacagagcagacttgaaacactctttttgtggaatttgcaagtggagatttcagccgctttgaggtcaatggtagaaaaggaaactatcttcgtataaagactagacagaatcattctcagaaactgctgcgtgatgtgtgcgttcaactctcagagtttaacttttcttttcattcagcggtttggaaacactctgtttgtaaagtttgcacgtggatattttgaccacttagaggccttcgttggaaacgggtttttttcatgtaaggctagacagaagaattcccagtaacttccttgtgttgtgtgcattcaactcacagagttgaacgttcccttagacagagcagatttgaaacagcctatttgtgcaattgcaagtgtagatttcaagctctttaaggtcaacggcagaaaaggaaatatcttcgtttcaaaactagacagaatcattcccacaaactgcgttgtgatgtgttcgttcaactcacagagtttaacctttgttttcatagagcagttaggaaacagtctgtttgtcaattctgtaagtggatattctgacatcttgtggccttcgttggaaacgggatttcttcatattctgctagacagaagaattctcagtaacttccttgtgttgtgtgtattcaactcacagagttgaacgatcctttacacagagcagacttgaaacactctttttgtgaaatttgcaagtggagatttcagccgctttgaggtcaatagtagaaaaggaaatatcttcgtagaaaaactagacagaatgattctcagaaactcctttgtgatgtggtgttcaactcacagagtttaacctttcttttcatagagcagttagtaaacactctgtttataaagtctgcaagtggatattcagacccctttgaggccttcgttggaaacgggatttcttcatattatgctagacagaagaattcccagtaacttccttgtgttgtgtgtgttcaactcacagagttgaactttcatttacacagagcagatttgaagcactctttttgtggaatttgcaggtggagatttcaagcgctttgaggccaaaggcagaaaaggaaatatcttcgtataaaaactagacagaatcattctcagaaactgctctgcgatgtgtgcgttcaagtctcagagtttaacttttcttttcattcagcagtttggaaacactctgtttgtaaagtctgcacgtggataatttgaccacttagaggccttcgttggaaacgggtttttttcatgtaaggctagacagaagaattctcagtaacttccttgtgttgtgtgtattcaactcacacagttgaacgatcctttacacagagcagacttgtaacactctttttgtggaatttgcaagtggagatttcagccgctttgaagtcaaagtagaaagggaaatatcttcctataaaaactagacagaatcattcccacaaactgcgttgggatgtgttcgttcaactcacagagtttaacctttcttttcatagagcagttaggaaacagtctgtttgtcaattctgtaagtggatattctgacatcttgtggccttcgttggaaacgggatttcttcatattctgctagacagaagaattctcagtaacttccttgtgttgtgtgtattcactcacagagttgaacgatcctttacacagagcagacttgtaacactctttttgtggaatttgcaagtggagatttcagccgctttgaagtcaaaggtagaaaaggaaatatcttcctataaaaactagacagaatgattctcagaaactcctttgtgatgtgtgcgttcaactcaaagagtttaacttttcttttcatagagcagttaggaaacactctgtttgtatagtctgcaagtggatattcagacctatttgaggccttcgttggaaacgggatttcttcatattatgctagacagaagaattcccagtatcttccttgtgttgtgtgtgttcaactcacagagttgaactttcatttacacagagcagatttgaaacactctttttgtggaatttgcaagtggagatttcaagcgctgtgaggccaaaggcagaaaaggaaatatcttcgtataaaaactagacagaatcattctcagaaactgctctgcgatgcgtgcgttcaactctcagagtttaacttttgttttcattcagcagtttggaaacactctgtttgtaaagtctgcacgtggataatttgaccacttataggccttcgttggaaacgggtttttttcctgtaaggctagacagaagaattcccagtaacttccttgtgttgtgtgcattcaactcacacagatgaacgttcccttagacagagcagatttgaaacactctatttgtgcaatttgcaagtgtagatttcaagcgctttaaggtcaatggcagaaaaggaaatatcttcgtttcaaaactagacagaatcattcccacaaactgcgttgtgatgtgttcgttcaactcacagagattaacctttctgttcatagagcagttaggaaacactctgtttgtaaagtccgtaagtggatattctgacatcttgtggccttgtttggaaaccggacttcttcatatactgctagacagaataattctcagtaacttccttgtgttgtgtgtattccactcacagagttgaacgatcctttacagagagcagacttgaaacactctttttgtggaatttgcaagtggagatttcagccgctttgaggtcaatggtagaatagggaatatcttcctatagaaactagacagaatgattctcagaaactcctttgtgatgtgtgtgttcaactcacagagtttaacctttcttttcatagagcagttagtaaacactctgtttataaagtctgcaagtggatattcaggcccctttgaggccttcgttagaaacgggatttcttcatattatgctagacagaagaattctcagtaacttccttctgttgtgtgtattcaagtgacagagttgaactttcatttagagagagcagatttgaaacactgtttttgtggaatttgcaagtggagatttcaagcgctttggggccaaaggcagaaaaggaaatatcttcgtataaaaagtagacagaatcattctcagaaaatgctctgtgatgtgtgcgttgaactctcagagtttaacttttgttttcattcagcagtttggaaatactctgtttgtaaattctgcacgtggatattttgaccacttagaggccttcgttggaaacgggtttttttcatgtaagggtagacagaagaattcccagtaacttccttgtgttgtgtacattcaactcacagagttgaacgttttcttagacagagcagatttgaaacactctttttgtgcaattggcaaatggagatttcaagcgctttaaggtcaatggcagaaaaggaaatatcttcgtttcaaaactagacagaatcattcccacaaactgcgttgtgatgtgttcgttcaactcacagagttttacctttcttttcatagagcagttaggaaacagtctgtttgtcaattctgtaagtggatattctgacatcttgtggccttcgttggaaacgggatttcttcatattctgctagacagaagaattctcagtaacttccttgtgttgtgtgtattcaactcacagagttgaacgatcctttacacagagcagacttgaaacactctttttgtggaatttgcaagtggagatttcagccgctttgaggtcaatggtagaaaaggatatatcttcgtataaagactagacagaatgattctcagaaactcctttgtgttgtgtgtgttcaactcacagagtttaacctttctttccatagagcagttaggaaacactctgtttgtaaagtctgcaagtggatattcagacctcctagaggccttcgttggaaacaggatttcttcatattatgctagacagaagaattcccagtaacttccttgtgttgtgtgtgttcaactcacagagttgaactttcatttacacagagcagatttgaaacactctttttgtggaatttgcaagtggagatttcatgcgctttgaggccaaaggcaaaaaaggaaatatcttcgtttcaaaactagacagaatcattctcagaaactgctctgcgatgtgtgcgttcaactctcagagtttaacttttcttttcattcagcagtttgaaaacactctgtttgtaaagtctgcacgtggatattttgaccacttagaggccttcgttggaaacgggtttttttgcctgtaaggctagacagaagaattcccagtaacttccttgtgttgtgtacattcaactcacagagttgaacgttcccttagacagagcagatatgaaacactctttttgtgcaattggcaaatggagatttcaagcgctttaaggtcaatggcagaaaaggaaatatcttcgtttcaaaactagaccgagtgattctcagaaactcctttgtgatgtctgcgttcaactcacagagtttaacctttcttttcatagaacagttaggaaacactctgtttgtaaagtctgcaagtggatattcagacctccttgaggccttcgttggaaacggtatttcttcatattctgctatacagaagaattctcagaaacttccttgtgttgtgtgtattcaactcacagagttgaacgatcgtttacacagagcagacttgagacactctttttgtggtatttgtaagtggagatttcagccgctttgaggtcaatggtagaaaaggaaatatcttcgtataaaaactagacagaatgattctcagaaactcctttgtgatgtgtgtgttcaactcacagagtttaacctttcttttcatagagcagttaggaaacactctgtttgtaaagtctgcaagtggatattcagacctctttgaggccttcgttggaaacgggatttttcatataaggctagacagaagaattcccagtaacttcccttgtgttgtgtgtgttcaactcacagagttgaactttcatttacacagagcagatttgagacactctttttgtggaatttgctaatggagatttcaagcgctttgaggccaaaggcagaaaaggaaatatcttcgtataaaaactagacagaatcattctcagaaactgctgcgtgatgtgtgcgttcaactctcagagtttaacttttcttttcattcagcagtttggaaacactctgtttgtaaagtctgcacgtggaaattttgaccacttagaggccttcgttggaaacgggtttttttcatgtaaggctagacagaagaattctcagtaacttccttgtgttgtgtgtattcaactcacagagttgaacgatcctttacacagagcagacttgaaacactctatttgtgcaattggcaagtgtagatttcaagcgctttaaggtcaatggcagaaaagggaatatcttcgtttcaaaactagacagaatcattcccacaaactgcgttgtgatgtgttcgttcaactcacagagtttaacctttctgttcatagagcagttaggaaacactctgtctgtaaagtctgcaagtggatattcagacctccttgaggccttcgttggaaacgggatttcttcatattctgctagacagaagaattctcagtaacttccttgtgttgtgtgtattcaactcacagacttgaaggatcctttacagagaggaggcttgaaaccctctttttgtggaatttgcaagtggagatttcagccgctttgaggtcaatggtagaataggaaatatcttcttatagaaactagacaaaatgattctcataaactcctttgtgatgtgtgcgttcaactcacagaagtttaacctttctgttcatagagcagttaggaaacactctgtttgtaaagtctgcaagtggatattcagacctccttgaggccttcgttggaaacgggatttcttcatattctgctagacagaagaattcccagtaacttccttgtgttgtgtgtgttcaactcacagagttgaactttcatttacacagagcagatttgaaacactctttttgtggaatttggaaatggagatttcaagcgctttgaggccaaaggcagaaaaggaaatatcttcgtataaaaactagacagaatcattctcagaaactgctgcgtgatgtgttcgttcaactctcagagtttaacttttcttttcattcagcggtttggaaacactctgtttgtaaagtctgcacgtggatattttgaccacttagaggccttcgttggaaacgggtttttttcatgtaaggctagacagaagaattcccagtaacttccttgtgttgtgtgtgttcaactcacagagttgaactttcatttacacagagcagatttgaaacactctttttgtgcaattggcaaatggagatttcaagcgctttaaggtcaatggcagaaaaggaaatatcttcgtttcaaaactagacagaatcattcccacaaactgcgttgtgatgtgttcgttcaaatcacagagtttaacctttctgttcatagagcagttaggaaacactctgtttgtaaagtctgtaagtggatattctgacatcttgtggcgttcgttggaaacgggatttcttcatcttctgctagagagaagaattctcagtaacttccttgtgttgtgtgtattcaactcacagagttgaacgttcctttacacagagcagacttgaaacactcgttttgtggaatttgcaagtggagatttcagccgctttgaggtcaatggtagaaaaggaaatatcttcgtataaaaactagacagaatgattctcagaaactcctttgtgatgtgtgcgttcaaatcacagagtttaacctttcttttcatagagcagttaggaaacactctgtttgtaaagtctgcaagtggatattcagacctccttgaggccttcgttggaaacgggatttctacatattatgctagacagaagaattcccagtaacttcccttgtgttgtgtgtgttcaactcacagagttgaactttcatttacacagagcagatttgaaacactctttttgtggaatttgcaaatggagatttcaagcgctttgaggccaaaggcagaaaaggaaatgtcttcgtttcaaaactagacagaatcattctcagaaactgctctgcgatgtgtgcgttcaactctcagagtttaacttttcttttcattcagcagtttggaaacactctggttgtaaagtctgcacttggataacttgaccacttagaggacttcgttggaaacgggtttttttacctgtaaggctagacagaagaattctcagtaacttccttttgttgtgtgtattcaactcacagagttgaacgatcctttacacagagcagacttgaaacactctttttgtggaatttgcaagtggagatttcagccgctttgaggtcaatggtagaataggaaatatcttcctatagaaactagacagaatgattctgagaaactcctttgtgatgtgtgcgttcaactcacagagtttaacctttcttttcatagagcagttaggaaacactctgtttgtaaagtctgcaagtggatattcagacatctttgaggccttcgttggaaacgggatttcttcatgttctgctagacaaaagaattctcagtaacttcctagtgttgtgtgtattcaactcacagagttgaacgatcctttacacagagcggacttgaaacactctttttgtggaatttgcaagtggagatttcagccgcgttgaggtcaatggtagaaaaggaaatatcttcgtataaaaactagacagaatgattctcagaaactcctttgtgatgtgtgcgttcaactcacagagtttaacctttcttttaatagagcagttaggaaacactctgcttgtaaagtctgcaagtggatattcagccctctttgaggccttcgttggaaacgggtttttttcatataaggctagacagaagaattctcagtaacttccttgtgttgtgtgtgttcaacacacagagttgaactttcatttacccagagcagatttgaaacactctttttgtggaatttgcaagtggagatttcaagcgctttgaggccaaaggcagaaaaggaaatatcttcgtttcaaaactagacagaatcattctcagaaactgctatgcgatgtgtgcgttcaactctcagagtttaacttttcttttcattcagcagtttggaaacactctgtttgtaaagtctgcacgtggatatttgaccacttagaggccttcgttggaaacgggtttttttcctgtaaggctagacagaagaattctcagtaactttccttgtgttgtgtgtattcaactcacagagttgaacgatcctttacacagagcagacttgtaacactctttttgtggaatttgcaagtggagatttcagccgctttgaagtcaaaggtagaaaagggaatatcttcctataaaaactagacagaattattctcagaaactcctttgtgatgtgtgtgttcaactcacagagtttaacctttcttttcatagagcagttagtaaacactctgtttataaagtctgcaagtggatattcagacccctttgaggccttcgttggaaaagggatttcttcatattatgctagacagaagaattctcagtaacttccttgtgttgtgtgtattcaactcacagagttgaacgatcctttacagagagtagacttgaaacactctttttttggaatttgcaagtggagatttcagccgctttgaggtcaatggtagaataggaaatatcttcctatagaaactagacagaatgattctcataaactcctttgtgatgtgtgcgttcaactcacagagtttaacctttcttttcatagagcagttaggaaacactctgtttgtaaagtctgcaagtggatattcagacctttttgaggccttcgttggaaacgggatttcttcatattctgctagacagaagaattctcagtaacttccttgtgttgtgtgtattcaactgacagagttgaactatcatttagagagagcagatttcaaacactgtttttgtggaatttgcaagtggagatttcaagcgctttggggccaaaggcagaaaaggaaatatcttcgtataaaaactagacagaatcattctcagaatctgctgcgtgatgtgtgcgttcaactctcagagtttaacttttcttttcattcagcggtttggaaacactctgtttgtaaagtctgcacgtggatattttgaccacttagaggccttcgttggaaacgggtttttttcatgtaaggctagacagaagaattcccagtcacttccttgtgttgtgtgcattcaactcacagagttgaacgttcccttcagacagagcagatttgaaacactctatttgtgcaatttgcaagtgtagatttcaagcgctttaaggtcaacggcagaaaaggaaatatcttcgtttcaaaactagacagaatgattctcagaaactcctttgtgatgtgtgcgttcaactcacagagtttaacctttctttttatagagcagttaggaaacactctctaaagtctgcaagtggatattcagacctctttgaggccttcgttggaaacgggatttcttcatattatgctagacagaataattctcagtaacttccttgtgttgtgtgtattcaactcacagagttgaacgatcctttacagagtgcagacttgaaacactctttttgtggaatttgcaagtggagatttcagccgctttgaggtcaatgatagaataggaaatatcttcctatagaaactagacagaatgattctcagaaactcctttgtgatgtgtgcattcaactcacagagtttaacctttcttttcatagagcagttaggaaacactctgtttgtaaagtctgcaagtggatattcagacctctttgaggccttcgttggaaacgggatttcttcatattctgctagagagaagaattctcagtaacttccttgtgttgtgtgtattcaactcaaagagttcaacgatcctttatacagagcagacttgaaacactctttttgtggaatttgcaagcggagatttcagccgctttgaggtcaattgtagaaaaggaaatatcttcgtataaaaactagacagaatcattctcagaaactgctctgcgatgtgtgcgttcaactctcagagtttaacatttcttttcattcagcagtttggaaacactctgtttgtaaagtctgcacgtggataatttgaccacttagaggccttcgttggaaacgggtttttttcatgtaaggctagacagaagaattcccagtaacttccttgtgttgtgtgcattcaactcacagagatgaacgttcccttagacagagcagatttgaaacagtctatttgtgcaatttgcaagtgtagatttcaagcgctttaaggtcaatggcagaaaaggaaatatcttcgtttcaaaactagacagaatcattcccacaaactgcgttgtgatgtgttcgttcaacccacagagtttaacctttctgttcatagagcagttaggaaacactctgtttgtaaagtctgcaagtggatattctgacatcttgtggccttcgttggaaacgggatttcttcatattctgctagacagaagaattctcagtaacttccttgtgttgtgtgtattcaactcacacagttgaacgatcctttacacagagcagacttgtaacactctttttgtggaatttgcaagtggagatttcagccgctttgaagtcaaaggtagaaaaggaaatatcttcctataaaaacaagacagaatgattcttagaaactcctttgtgatgtgtgcgttcaactcacagagtttaacctttcttttcatagagcagttaggaaacactctgtttgtaaagtctgcaagtggatattcagacctctttgaagccttcgttggaaacgggatttcttcatattatgctagacagaagaattctcagtaacttccttgtgttgtgtgtattcaactgacagagttgaactatcatttagagagagcagatttgaaacactgtttttgtggaatttgcaagtggagatttcaagcgctttggggccaaaggcagaaaaggaaatatcttcgtataaaaaatagacagaatcattctcagaatctgctgcgtgatgtgtgcgttcaactctcagagtttaacttttcttttcattcagcggtttggaaacactctgtttgtaaagtctgcacgtggatattttgaccacttagaggccttcgttggaaacgggtttttttcatttaaggctagacagaagaattcccagtaacttccttgtgttgtgtacattcaactcacagcaggtgaacgttcccttagacagagcagatttgaaacactctttttgtgcaattggcaagtggagatttcaagcgctttaaggtcaatggcagaaaaggaaatatcttcgtttcaaaactagacagaatcattcccacaaactgcgttgtgatgtgttcgttcaactcacagagtttaacctttcttttcatagagcagttaggaaacactctgtttgtaaagtctgcaagtggatattcagacctctttgaggccttcgttggaaacgggatttcttcatactgtgctagacagaagtattctcagtaacttccttgtgttgtgtgtattcaactcacagagttgaatcatcctttacacagagcagacttgaaacactctttttgtggaatttgcaagtggagatttcagccgcgttgaggtcaatggtagaaaaggaaatatcttcgtataaaaactagacagaatgattctcagaaactcctttgtgatgtgtgtgttcaactcacagagtttaacatttcttttcatagagcagttaggaaacactctgtttgtaaagtctgcaagtggatattcagacctctttgaggccttcgttggaaacgggtttttttcatataaggctagacagaagaattcccagtaacttccttgtgttgtgtgtgttcaactcccagagttgaactttcatttacacagagcagatttgaaacactctttttgtggaatttgcaaatggagatttcaagcgctttgaggccaaaggcagaaaaggaaatatcttcgtataaaaactagacagaatcattctcagaaactgctctgtgatgtgtgcgttcaactctcagagtttaacttttcttttcattcagcagtttggaaacactctgtttgtaaattctgcacgtggatattttgaccacttagaggccttcgttggaaacgggtttttttcatgtaagggtagacagaagaattcccagtaacttcctgtgttgtgtacattcaactcacagagttgaacgttcccttagagagagcagatttgaaatactctttttgtgcaattggcaagtggagatttcaagcgctttaaggtcaatggcagaaaaggaaatatcttagtttcaaaactagacagaatgattctcagaaactcctttgtgatgtgtgcgttcaactcacagagtttaacctttcttttcatagagcagttaggaaacactctgtttgtaaagtctgcaagtggatattcagacctctttgaggccttcgttggaaacgggatttcttcatattatgctagacacaagaattctcagtaacttccttgtgttgtgtgtattcaactcacagagttgaacgatttcttacacagagcagagttgaaacactctttttctggaatttgcaagtggagatttcagccgctttgaggtcaatggtagaataggaaatatcttcctatagaaactagacagaatgattctcagaaactcctttgtgatgtgtgcgttcaactcacagagtttaacctttcttttcatagagcagttaggaaacactctgtttgtaaagactgcaagtggatattcagacctccttgaggccttcgttggaaacgggatttcttcatattatgctagacagaagaattcccagtaacttccttgtggtgtgtgtgttcaagtcacagagttgaactttcatttacacagagaagatttgaaacactctttttgtggaatttgcaagtggagatttcaagcgctttgaggccaaaggcagaaaaggaaatatcttcgtttcaaaactagacagaatcattctcagaaactgctgcgtgatgtgtgcgttcaactctcagagtttaacttttcttttcattcagcggtttggaaacactctgtttgtaaagtctgcaagtggatattttgaccacttagaggccttcgttggaaacgggtttttttcatgtaaggctagacagaagaattcccagtaacttccttgtgttgtgtacattcaactcacagagttgaacgttcccttagacagagcagatttgaaacactctttttgtgcaattggcaaatggagatttcaagcgctttaaggtcaatggcagaaaaggaaatatctttgtttcaaaactagacagaatgattctcagaaactcctttgtgatgtgtgtgttcaactcacagagtttaacttttcttttcatagagcagttaggaaacacaatgtttgtaaagtctgcaagtggatattcagacctccttgaggccttcgttggaaacgggatttcttcatattatgctagactgaagaattctcagtaacttcccttgtgttgtgtgtattcaactcacagagttgaacgatcctttacacagagcagacttgaaacactctttttgtggaatttgcaagtggagatttcagccgctttgaggtcaacggtagaataggaaatatcttcctatagaaactagacagaaatgattctcagaaactcctttgagatgtgtgtgttcaactcacagagtttaacctttcttttcatagagcagttaggaatcactctgtttgtaaagtctgcaagtggatattcagacctctttgaggccttcgttggaaacgggtttttttcatataaggctagacagaagaattctcagtaacttccttgtgttgtgtgtattcaactgacagagttgaactttcatttagagagagcagatttgaaaaactgtttttgtggaatttgcaagtggagatttcaagcgctttggggcaaaaggcaggaaaggaaatatcttcgtataaaaactagacagaatcactctcagaaactgctctgcgatgtgtgcgttcaactctcagagtttaacttttcttttcattcagcagtttggaaacactctgtttgtaaagtctgcacgtggatatttttaccactcagaggccttcgttggaaacgggtttttttcctgtaaggctagacagaagaattcccagtaacttccttgtgttgtgtacattcaactcacagagtttaacgttcccttagacagagcagatttgaaacactctttttgtgcaattggcaagtggtgatttcatccgctttgaggtcaatggtagaaaaggaaatatcttcgtataaaaactagacagaatcattcccacaaactgcgttgtgatgtgttcgttcatctcacagagtttaacctttcttttcatagagcagttaggaaacactatgtttgtaaattctgtaagtggatattctgacatcttgtggccttcgttggaaacgggatttcttcatattctgctagacagaagaattctcagtaactcccttgtgttgtgtgtattcaactcacagagttgaacgatcctttacacagagcagacttgtaacactctttttgtgtaatttgcaagtggagatttcagccgctttgaagtcaaaggtagaaaaggaaatatcttcctataaaaactagacagaatgattctcagaaactcctttgtgatgtgtgcgttcaactcacagagtttaacctttctgttcatagagcagttaggaaacactctgtttgtaaagtctgcaagtggatattcagacctccttgaggccttcggtggaaacgggatttcttcatattctgctagacagaagaattctcagtaacttccttgggttgtgtgtattcaactcacagagttgaacgatcctttacacagagcagacttgaaacactctttttgtggaatttacaagtggagatttcagccgttttgaggtcaatggtagaaaaggaaatatcttcgtataaagactagacagaatcattctcagaaactgctgcgtgatgtgtgcgttcaactctcagagtttaacttttcttttcattcagcggtttggaaacactctgtttgtaaagtctgcacgtggatattttgaccacttagaggccttcgttggaaacgggtttttttcatgtaaggctagacaaaataattctcagtaacttccttgtgttgtgtgtattcaactcacatagttgaacgatcctttacagagagcagacttgaaacactctttttgtggaatttgcaagtggagatttcagccgctttgaggtcaatggtagaataggaaatatcttcccatagaaaatagacagaatgattatcataaactcctttgtgatgtgtgccttcaactcacagagtttaacctttcttttcatagagcagttaggaaacactctgtttgtaaagtctgcaagtggatattcagacctccttgaggccttcgttggaaacgggatttcttcatattctgctagacagaagaattctcagtaacttccttgtgttgtgtgtattcaactcacagagttgaacgatcctttacaccgagcagacttgaaacactttttttgtggaatttgcaagtggagatttcagccggtttgaggtcaatagtagaaaaggaaatatcttcgtagaaaaactagacagaatgattctcagaaactcctttgtgatgtgtgcgttcaactcacaggagtttaacctttctgttcatagagctggtaggaaacactctgtttgtaaactctgcaagtggatattcagacctccttgaggccttcgttggaaacgggatttcttcatattctgctagacagaagaattcttagtaacttccttgtgttgtgtgtattcaactgacagagttgaactttcatttagagagagcagatttgaaacactgtttttgtggaatttgcaagtggagatttcaagcgctttggggccaaaggcagaaaaggaaatatcttcgtataaaaactaggcagaatcattctcagaaactgctgcgtgatgtgtgcgttcaactctcagagtttaacttttcttttcattcagctgtttggaaacactctgtttgtaaagtctgcacgtggatattttgaccacttagaggccttcgttggaatcgggtttttttcatgtaaggctagacagaagaattcccagtaacttccatgtgttgtgtgcattcaactcacagagttgaacgttcccttagacagagcagatttgaaacactctatttgtgcaatttgcaagtgtagatttcaagcgctttaaggtcaatggcagaaaaggagatatcttcgtttcaaaactagacagaatcattcccacaaactgcgttgtgatgtgttcgttcaactcacagagtttaacctttctgttcatagagcagttaggaaacactctgtttgtaaagtctgtaagtgcatattctgacatcttgtggccttcgttggaaacgggatttcttcatattctgctagacagaagaattctcagtaacttctttgtgttgtgtgtattcaactcacagagttaaacgatcctttacacagagcagacttgaaacactctttttgtggaattttcaagtggagatttcagccgctttgaggtcaatggtagaataggaaatatcttcctatagaaactagacagaatgattctcagaaactcctttgtgatgtgtacgttcaactcacagagttcaacctttcttttcatagagcagttaggaaacactctgtttataatgtctgcaattggatattcagacctctttgaggccttcgttggaaacgggatttcttcatattctgctagacagaagaattcccagtaacttccttgtgttgtgtgtgttcaactcacagagttgaactttcatttacacagagcagatttgaaacactctttttgtggaatttgcaagtggagatttcaagcgctttgaggccaaaggcagaaaaggatatatcttcgtataaaaactagacagaatcattctcagaaactgctctgcgatgtgtgcgttcaactctcagagtttaacttttcttttcattcagcagtttggaaacactctgtttgtaaagtctgcacgtggataacttgaccacttagaggccttcgttggaaacgggtttttttcacgtaaggctagacagaagaattctcagaaacttccttgtgtagtgtatattcaactcacagagttgaacgatcctttacacagagcagacttgaaacactctttttgtggattttgcaagtggagatttcaagcgcttttggggccaaagccagaaaaggaaatatcttcatataaaaactagacagaatcattctcagaaactgctctgcgatgtgtgcgttcaactctcagagtttaacttttcttttcattcagcagtttggaaacactctgtttgtaaagtctgcacgtggataatttgaccacttagaggccttcgttggaaacgggtttttttcatgtaaggcttgacagaagaattctcagtaacttccttgtgttgtgtgtattcaactcacagagttgaccgatcctttacacagagcagacttgtaacactctttttgtggaatttgcaagtggagatttcagccgctttgaagtcaaaggtagaaaagggaatatcttctaataaaaactagacagaatgattctcagaaactcctttgtgatgtgtgtgttcaactcaccgagtttaacctttcttttcatagagcagttagtaaacactctgtttataaagtctgcaagtggatattcagacccctttgaggccttcgttggaaacgggatttcttcatattatgctagacagaagaattctcagtaacttcccttgtgttgtgtgtattcaactgacatagttgaactttcatttagagagagcagatttgaaactctgtttttgtggaatttgcaagtggagatttcaagcgctttggggccaaaggcagaaaaggaaatatcttcgtataaaaactagacagaatcattctcagaaactgctctgtgatgtgtgcattcagctctcagagtttaacttttcttttcattcagcagtttggaaacactctgtttgtaaagtctgcactggatattttgaccacttagaggccttcgttggaaacgggtttttttcatgtaaggctagacagaagaattcccattaacttccttgtgttgtgtgcattcaactcacagagatgaaagatcccttagacagagcagatttgaaacactctatttgtgccatttgcaagtgtagatttcaagcgctttaaggtcaatggcagaaaaggaaatatcttcgtttcaaaactagacagaatcattcccacaaactgcgttgtgatgtgttcgttcaactcacagagtttaacctttctgttcatagagcagttaggaaacactctgtttgtaaagtctgtaagtggatattctgacatcttgtggccttcgttggaaacgggatttcttcatattctggtagacagaagaattctcagtaacttccttgttttgtgtgtattcaactcacagagttgaacgatcctttacagagagcagacttgaaacactctttttgtggaatttgtaagtggagatttcagccgctttgaggtcaacggtagaataggaaatatcttcctattgaaactagacagaatgattctcataaactcctttgtgatgtgtgcgttcaactcacagagtttaacctttcttttcatagagcagttaggaaacactctgtttgtaaagtctgcaagtggatattcagacctccttgaggccttctttggaaacgggatttcttcatattctgatagacagaagaattctcagtaacttccttgtgttgtgtgtattcaactcacagagttgaacgatcctttacagagagcagacttgaaacactctttttgtggaatttgcaagtggagatttcagccgctttgaggtcaatggtagaaaaggaaactatgttcgtataaagactagacagaatgattctcagaaactgctttgtgatgtgtgcgttcaactcacagagtttaacctttcttttcatagagcagttaggaaacactctgtttgtaaagtctgcaagtggatattcagacctctttcaggacttctttggaaacgggatttcttcatattctgctagacagaagaattctcagtaacttccttgtgttgtgtgtattcaactcatagagttgaacgatcctttagaggagagcagtcttgaaacactctttttgtggaatttgcaagtggagatttctgccgctttgaggtcaatggtagaataggaaatatcttcctatagaaactagacagaatgattctcagaaacttctttgtgatgtgtgcgttcaactcacagagtttaacctttcttctcatagagcagttaggaaacactctgtttgtaaagtctgcaattggatattcagacctctttgaggccttctttggaaacgggatttcttcatactgtgctagacagaagaattctcagtaacttccttgtgttgtgtgtattcaactcacagagttgaacgatcctttacacagagcggacttgaaacactctttttgtggaatttgcaagtggagatttcagccgctttgaagtcaaaggtagaaaaggaaatatcttcctataaaaactagacagaaatgattctcagaaactcctttgtgatgtgtgcgttcaactcacagagtttaacctttcttttcatagagcagttaggaaacactctgtttgtaaagtctgcaagtggatattcagacctctttgaggccttcgttggaaacgggtttttttcatataaggctagatagaagaattcccagtaacttccttgtgttgtgtgtgttcaactcacagagttgaactttcatttacacagagcagatttgaaacactctttttgtggaatttgcaaattgagatttcaagcgctttgaggccaaaggcagaaaaggaaatatcttcgtataaaaactagacagaatcattctcagaaactgctctgcgatgtgtgcgttcaactctcaagagtttaacttttcttttcattcagcagtttggaaacactctgtttgtaaagtctgcacgtggatattttgaccacttagaggccttcgttggaaacgggtttttttcctgtaaggctagacagtagaattcccagtaacttccttgtgttgtgtacattcaactcacagagttgaacgttcccttagacagagcagatttgaaacactctttttgtgcaattggcaaatggagatttcaagcgctttaaggtcaatggcagaaaaggaaatatcttcgtttcaaaagtagacagaatcattcccacaaactgcgttgtgatgtgttcgttcaactcacagagtttaacctttctgttcatagagcagttaggaaacactctgtttgtaaagtctgtaagtggatattctgacatccttgtggccttcgttggaaacgggatttcttcatattctgctagacagaagaattctcactaacttccttgtgttgtgtgtattcaactcacagagttgaacgatcctttacacagagcagactggaaacactctttttgtggaatttgcaagtggagatttcagccgctttgaggtcaatggtagaaaaggaaatatcttcgtataaagactagacagagtgattctcagaaactcctttgtgatgtctgcgttcaactcacagagtttaacctttcttttcatagagcagttaggaaacactctgtttgtaaagtctgcaagtggatattcagacctccttgaggccttcgttggaaacgggatttcttcaaattctgctatacagaagaattcccagtaacttccttgtgttgtgtgtgttcaactcacagagttgaactttgatttacacagagcagatttgaaacacactttttgtggaatttgcaagtggagatttcaagcgctttgaggccaaaggcagaaaaggaaatatcttcgtataaaaactagacagaatcattctcagaaactgctgcgtgatgtgtgcgttcaactctcagagtttaacttttcttttcattcagcggtttggaaacactctgtttgtaaagtctgcacgtggaaattttgaccacttagaggccttcgttggaaacgggtttttttcatgtaaggttagacagaagaattcccagtaacttccttgtgttgtgtacattcaactcacagagttgaacgttcccttagacagagcagatttgaaacactctttttgtgcaattggcaaatggagatttcaagcactttaaggtcaatggcagaaaatgaaatatcttcgtttcaaaactagacagaatgattctcagaaactcctttgtgatgtgtgcgttcaactcacagagttcaaccttttttttcatagagcagttgggaaacactctgtttgtaaagtctgcaagtggatattcagacttctttgaggccttcgttggaagcgggatttcttcatattctgctagacagaggaattctcagtaacttccttgtgttgtgtgtattcaactcacagagttgaacgatcctttacacagagcagacttgtaacactctttttgtggaatttgcaagtggagatttcagccactttgaagtcaaaggcagaaaaggaaataacttcctataaaaactagacagaatgattctcagaaactcctttgtgatgtgtgcgttcaactcaccgagtttaccctttcttttcatagagcagttgggaaacactctgtttgtaaagtctgcaagtggatattcagacctccttgaggctttcgttggaaacgggatttcttcatattctgctagaaagaaggattcccagtaacttccttgtgttgtgtgtgttcaactcacagagttgaactttcatttacacagagcagatttgaaacactctttttgtggaatttgcaagtggagatttcaagcgctttgaggccaaaggcagaaaaggaaatatcttcgtttcaaaactagacagaatcattctcagaaactgctctgcgatgtgtgcgttcaactctcagagtttaacttttcttttcattcagcagtttggaaacactctgtttgtaaagtctgcacgtggataacttgaccacttagaggccttcgttggaaacgggtttttttcacgtaaggttagacagaagaattcccagtaacttccttgtgttgtgtacattcaactcacagagttgaacgttcccttagacagagcagatttgaaacactctttttgtgcaattggcaaatggagatttcaagcgctttaagttcaatggcagaaaaggaaatatcttcgtttcaaaactagacagaatcattcccacaaactgcgttgtgatgtgttcgttcaactcacagagtttaacctttctttcatagagcagttaggaaacagtctgtttgtcaattctgtaagtggatattctgacatcttgtggccttcgttggaaacgggatttcttcatattctgctagacagaagaattctcagtaacttccttgtgttatgtgtattcaactcacagggttgaacgatcctttacacagagcagacttgaaacactctttttgtggaatttgcaagtggagatttcagccgctttgaggtcaatggtagaaaaggaaatatcttcgtataaagactagacagaatgattctcagaaactcctttgtgatgtgtgcgttcaactcacagagtttaacctttcttttcatagagcagttaggaaacactctgtttgtaaagtctgcaagtggatattcagacctccttgaggccttggttggaaatgggatttcttcatattctgctagacagaagaattcccagtaacttccttgtgttgtgtgtgttcaactcacagatttgaactttcatttacacagagcagatttgaaacactctttttgtggaagttgcaagtggagatttcaagcgctttgaggccaaaggcagaaaaggaaatatcttcgtttcaaaactagacagaatcattctcagaaactgctgcgtgatgtgtgtgttcaactctcagagtttaactttccttttcattcaccggtttggaaacactctgtttgtaaagtctgcacgtggatattttgaccacttagaggccttcgttggaaacgggtttttttcatgtaaggctagacagaagaattcccagtaacttccttgtgttgtgtacattcaactcacagagttgaacgttcccttagacagagcagatttgaaacactctttttgtgcaattggcaaatggagatttcaagcgctttaagttcaatggcagaaaaggaaatatcttcgtttcaaaactagacagaatcattcccacaaactgcgttgtgatgtgttcgttcaactcacagagtttaacctttctgttcatagagcagttaggaaacactctgtttgtaaagtctgtaagtggatattctgacatcttgtggccttcgttggaaacggggtttcttcatattctgctagacagaagaattctcagtaacttccttgtgttgtgtgtattcaactcacagagttgaaagatcctttacacagagcagacttgaaacactctttttgtggaatttgcaagtggagatttcagccgctttgaggtcaatggtagaaaaggaaatatcttcgtataaagactagactgaatgattctcagaaactcctttgtgatgtgtgcgttcaactcacagagtttaacctttcttttcatagagcagttaggaaacactctgtttgtaaagtctgcaagtggatattcagacatccttgaggctttcgttggaaaggggatttcttcatattctgctagaaagaagaattctcagtaacttccttgtgttgtgtgtattcaactcacagagttgaacgatcctttacacagagcagacttgaaacactctttttgtggaatttgcaagtggagatttcagccgctttgagttcaatggtagaataggatatatcttcctatagaaactagacagaatgattctcagaaaatcctttgtgatgtgtgcgttcaactcaccgagtttaacttttcttttcatagagcagttaggaaacactctgtttgtaaagtctgcaagtggatattcagacctctttgaggccttctttggaaacgggatttcttcatattatgctagacagaagaattctcagtaacttccttgtgttgtgtgtattcaactgacagagttgaactttcatttagagagagcaggtttgaaacactgtttctgtggaatttgcaagtggggatttcaagcgctttggggccaaaggcagaaaaggaaatatcttcgtataaaaactagacagaatcattctcagaaactgctgcgtgatgtgtgcgttcaactctcagagtttaacttttcttttcattcagcggtttggaaacactctgtttgtaaagtctgtacgtggacattttgaccacttagaggccttcgttggaaacgggtttttttcatgtaaggctagacagaagaattcccagtaacttccttgtgttgtgtacattcaactcacagagttgaacgttcccttagacagagcagatttgaaacactctttttgtgcaattggcaagtggagatttcaagcgcgttgaggtcaatggcagaaaaggaaatatcttcgtttcaaaactagacagaatcattcccagaaactgcgttgtgatgtgttcgttcaactcacagagtttaacctttcttttcatagagcagttaggaaacagtctgtttgaaaattctgtaagtggatattctgacatcttgtggccttcgttggaaacgggatttcttcatattctgctagacagaagaattctcagaaacttccttgtgttgtgtgtattcaactcacagagttgaacgatcctttacacagagcagacttgaaacacactttttttggaattttcaagtggagatttcagccgctttgaggtcaatggtagaaaaggaaatatcttcgtataaagaatagacagaatgattctcagaaactcctttgtgatgtgggcgttcaactcacagagtttaacctttcttttcatagagccgttaggaaacactctgtttgtaaagtctgcacgtggatatttggacttctttgaggccttcgttggaaacgggtttttttcatgtaaggctagtcggaagagttcccactaacttccatgtgttgtgtgtgttcaattcacagagttgaactttcatttacacagagcagatttgaaacactctttttgtggaatttgcaaatggagatttcaagcgctttgaggccaaaggcagaaaaggaaatatcttcgtataaaaactagacagaatcattctcagaaactgctgcgtgatgtgtgcgttcaactctcagagtttaacttttcttttcattcagctgtttggaaacactctgtttgtaaagtctgcacgtggatattttgacaacttagaggccttcgttggaaacgggtttttttcatgtaaggctagacagaagaattctcagtaacttccttgtgttgtgtgtattcaactcacagagttgaacgatcctttacacagagcagacttgtaacacactttttgtggaatttgcaagtggagatttcagccgcttcgaagtcaaaggtagaaaaagaaatatcttcctataaaaacaagacagaatcattcccacaaactgcgttgtgatgtgttcattcaactcacagagtttaacctttcttttcatagggcagttaggaaacagtctgtttgtcaattctgtaagtggatattctgacatcttgtggccttcgttggaaacgggatttcttcatattctgctagacagaagaattctcagtaacttccgcgtgttgtgtgtattcaactcacagagttgaacgatcctttacacagagcagagttgaaacactctttttgtggaatttgcaagtggagatttcagccgctttgaggtcaatggtagaaaaggaaatatcttcgtataaaaagtagacagaatgattctcataaactcctttgtgatgtgtgcgttcaactcacagagtttaacctttcttttcatagagcagttaggaaaaactctgtttgaaaagtctgcaagtggatattcagacctccttgaggccttcgttggaaacgggatttcttcatattctgctagacagaacaattctcagtaatttccttgtgttgcgtgtattcaactcacagagttgaacgatcctttacacagagcggacttgaaacactctttttgtggaatttgcaattggagatttcagccgcgttgaggtcaatggtagaaaaggaaatatcttcgtataaaaactagacagaatcattctcagaaaccgctctgtgatgtgtgcgttcaactctcagagtttaacttttctttccattcagcagtttggaaacactctgtttgtaaagtctgcacgtggatattttgactacttagaggtctcggttggaaacgggtttttttcatgtaaggctagacagaagaattcccagtaacttccttgcgttgtgtacattcaactcacagagttgaacgttcccttagacagagcagatttgaaacactctttttgtgcaattggcaagtggagatttcaagcgctttgaggtcaatggcagaaaaggaaatatcttcgtttcaaaactagacagaatcattcccacaaactgcgttgtgatgtgttcgttcaactcacagagtttaacctttcttttcatagagcagttaggaaacagtctgtttgtaaattctgtaagtggatattctgacatcttgtggccttcgttggaaacgggatttcttcacattctgctagacagaagaattctcagtaacttccttgtgttgtgtgtattcaactcacagagttgaactgatcctttacacagagcagacttgaaacactctttttgtggaatttgcaagcggagatttcagccgctttgagttcaatggtagaataggaaatatcttcctatagaaactagacagaatgattctcagaaactcctttgtgatgtgggcgttcaactcacagagtttaacctttcttttcatagagcagttaggaaacactctgtttgtaaagtctgcaagtggatattcagacatctttgaggctttcgttggaaacgggatttcttcatattctgctatacagaagaattctcagaaacttccttgtgttgtgtgtattcaactcacagagttgaacgttcgtttacacagagcagacttgagacactctttttgtggaatttgtaagtggacatttcagccgctttgaggtcaatggtagaaaaggaaatatcttcatataaaaactagacagaatcattctcagaaactgctgcgtgatgtgtgcgttcaactctcaagagtttaacttttcttttcattcagcggtttggaaacactctgtttgtaaagtctgcacgtggatattttgaccacttagaggccttcgttggaaacgggtttttttcatgtaaggctagacagaaggattcccaggaacttccttgtgttgtgtacattcaactcacagagttgaacgttcccttagacagagcagatttgaaacactctttttgtgcaattggcaagtggtgatttcagccgctttgaggtcaatggtagaaaaggaaatatcttcgtataaaaactagacagaatcattcccacaaactgcgttgtgatgtgttcgttcaactcacagagtttaacctttctgttcatagagcagttaggaaacactctgtttgtaaactctgcaagtggatattctgacatcttgtggccttcgttggaaacgggatttcttcacattctgctagacagaagaattctcagtaacttccttgtgttgtgtgtattcaactcacagagttgaacgatcctttacagagagcagacttgaaacactctttttgtggaatttgcaagtggagatttcagccgctttgaggtcaagagtagaaaaggaaatatcttcgtagaaaaactagacagaattattctcctaaactccttcgtgatgtgtgcgttcaaatcacagagttgaacttttcttttcatagagcagttaggaaacactctgtttatatagtctgcaagtggatattcagacccctttgaggccttcgttggaaacgggatttcttcatattatgctagacagaagaattctcagtaacttccttgtgttgtgtgtattcaactgacagagttgaactttcttttagagagagcagatttgaaacactgtttttgtggaattttcaactggagatttcaagcgctttggggccaaaggcacaaaaggaaatatcttcgtataaaaactagacagaatcattctcagaaactgctctgcgatgtgtgcgttcaactctcagagtttaacttttcttttcattcagcagtttggaaacactctgtttgtaaagtctgcacgtggatattttgaccacttagaggccttcgttggaaacgagtattttttcctgtaaggctagacagaagaattcccagtaacttccttgtgttgtgtacattcaactcacagagttgaacgttcccttagacagagcagatttgaaagactctttttctgcaattggcaaatggagatttcaagcgctttaaggtcaatggcagaaaaggaaatatcttcgtttcaaaactagacagaatcattcccacaaactgcgttgtgatgtgttcgttcaactcacagagtttaacctttcttttcatagagcagttaggaaacagtctgtttgtcaattctgtaagtggatattctgacatcttatggccttcgttggaaacgggatttcttcatattctgctagacagaagaattctcagaaacttccttgtgttgtgtgttttcaactcacagagttgaacgatcctttacacagagcagacttgaaacattccttttgtggaatttgcaagtggagatttcagccgctttgaggtcaatggtagaataggaaatatcttcctatagaaactagacagaatgattctcagaaactcctttgtgatgtctgcgttcaactcacagagtttaacctttcttttcatagagcagttaggaaacactctgtttgtaaagtctgcaagtggatattcagacctccttgaggccttcgttggaaacgggatttcttcatattatgctagatagaagaattctcagtaactttccttgtgttgtgtgtattcaactgacagagttgaacgttcatttagagagagcagatttgaaacactgtttttgtggaatttgcaattggagatttcaagcgctttggggccaaaggcagaaaaggaaatatcttcgtataaaaactagacagaatcattctcagaaactgctgcgtgatgtgtgcgttcaactctcagagtttaacttttctttgcattcagcggtttggaaacactctgtttgtaaagactgcacgtggatattttgaccacttagaggccttcgttggaaacgggtttttttcatgtaaggctagacagaagaattcccagtaacttccttgtgttgtgtgcattccactcacagagttgaacgttcccttagacagagcagatttgaaacactctatttgtgcaatttgcaagtgtagatttcaagcgctttaaggtcaatggcagaaaaggaaatatcttcgtttcaaaactagacagaatcattcccacaaactgcgttgtgatgtgttcgttcatctcacagagtttaacctttcttttcatagagcagttaggaaacagtctgtttgtaaattctgtaagtggatattctgacatcttgtggccttcgttggaaacgggatttcttcatattctgctagacagaagaattctcagtaacttccttgtgttgtgtgtattcaactcacagagttgaacgatcctttacagagagcagacttgaaacactctttttgtggaatttgcaagtggagatttcagccgctttgaggtcaatggtagaaaaggaaatatcttcgtataaagaatagacagaatgattctcagaaactcctttgtgatgtgtgtgttcaactcacagagtttaacctttcttttcatagagcagttaggaaacactctgtttgtaaagtctgcaagtgggtattcagacctctttgaggccttcgttggaaacgggtttttttcatataaggctagacagaagaattcccagtaacttccttgtgttgtgtgtgttcaactcacagtagttgaactttcatttacacagagcagatttgaaacactctttttgtggaatttgcaggtggagatttcaagcgctttgaggccaaaggcagaaaaggaaatatcttcgtataaaaactagacagaatcattctcagaaactgctgcgtgatgtgtgcgttcaattctcagagtttaacttttcttttcattcagcggtttggaaacactctgtttgtaaagtctgcacgtggaaattttgaccacttagaggccttcgttggaaacgggtttttttcatgtaaggctagacagaagaattcccagtaacatccttgtgttgtgtacattcaactcacagagttgaacgttcccttagacaaagcagatttgaaacactctttttgtggaatttgcaaatggagatttcaagcgctttaaggtcaatggcagaaaaggaaatatcttcgtttcaaaactagacagaatcattcccacaaatggcgttgtgatgtgttcgttgaactcacagagtttaacctttctgttcatagagcagttaggaaacactctgtttgtaaagtctgtaagtggatattctgacatcttgtggccttcgttggaaacgggatttcctcatattctgctagacagaagaattctcagaatcttccttgtgttgtgtgtattcaactcacagagttgaacgatcctttacacagagcagacttgaaacactctttttatggaatttgcaagtggagatttcagccgctttgaggtcaatggtagaaaaggaaatatcttcctataaaaactagacagaatgattctcagaaaatcttttgtgatgtgtgcgttcaactcacagagtttaacttttcttctcatagagcagttaggaaacactctgtttgtaaagtgtgcaagtggatattcagacctctttgaggccttcgttggaaacgggatttcttcatattatgctagacagaataattctcagtaacttccttgtgttgtgtgtattcaactcacagagttgaacgatcctttacagagagcaggcttgaaacactctttttgtggaatttgcaagtggagatttcagccgctttgaggtcaatggtagaataggaaataccttcttatagaaactagacagaatcattctcagaaaatgctctgtgatgtgtgcgttcaactctcagagtttaacttttcttttcattcagcagtttggaaacactctgtttgtaaagtctgcacgtggatattttgaccacttagaggccttcgttggaaacgggtttttttcatgtaagggtagacagaagaattcccagtaacttccttgtgttgtgtgcattcaactcacagagttgaacattcccttagacagagcagatttgaaacactctatttgtgcaatttgcaagtgtagatttcaagcgctttaaggtcaatggcagaaaaggaaatatcttcatttcaaaactagacagaatcattcccacaaactgcgttgtgatgtgttcgttcaactcacagagtttaacctttcttttcatagagcagttaggaaacactctgttggtaaattctgtaagtggatattcttacatcttgtggccttcgttggaaacgggatttctacatattctgctagacagaagaattctcagtaacttcccttgtgttgtgtgtattcaactcacagagttgaacgatcctttacacagagcagacttgtaacactctttttgtgtaatttgcaagtggagatttcagccgctttgaagtcaaaggtagaaaaggaaatatcttcctataaaaactagacagaatgattctcataaactcctttgtgatgtgtgcgttcaactcacagagtttaacctttctgttcatagagctggtaggaaacactctgtttgtaaagtctgcaagtggatattcagacctccttgcggccttcgttggaaacgggatttcttcatattctgctagacagaagaattcccagtaacttccttgtgttgtgtgtgttcaactcacagagttgaactttcatttacacagagcagatttgaagcactctttttgtggaatttgcaaatggagatttcaagcgcttggaggccaaaggcagaaaaggaaatatcttcgtataaaaactagacagaatcattctcagaaactgctctgtgatgtgtgcgttcaactctcagagtttaacttttcttttcattcagcagtttggaaacactctgtttgtaaagtctgcacgtggataatttgaccacttagaggccttcgttggaaacgggtttttttcatgtaaggctacacagaagaattcccagtaacttccttgtgttgtgtacattcaactcacagagttgaacgttcccttagacagagcagatttgaaacactctttttgtgcaattggcaagtggtgatttcagccgctttgtggtcaatggtagaaaaggaaatatcttcgtataaaaactagacagaatcattcctacaaactgcgttgtgatgtgttcgttcaactcacagagtttaacctttctgttcatagagcagttaggaaacactctgtttgtaaagtctgtaagtggatattctgacatcttgtggccttcgttggaaacgggatttcttcatattctgctagacagaagaattctcagtaacttccttgtgttgtgtgtattcaactcacagagttgaacgatcctttacacagagcagacttgaaacactccttttgtggaatttgcaagtggagatttcagccgctttgaggtcaatggtagaaaaggaaactatcttcgtataaagactagacagaatgattctcataaactcctttgtgatgtgtgcgttcaactcacagagtttaacctttcttttcatagagcagttaggaaacactctgtttgtaaagtctgcaagtggatattcagacctctttgaggccttcgttggaaactggatttcttcatattatgctagacagaagaattcccagtaacttccttgtgatgtgtgtgttcaactcacagagttgaactttcatttacacagagcagatttgaaacactctttttgtggaatttgcaagtggagatttcaagcgctttgaggccaaaggcagaaaaggaaatatcttcgtataaaaactagacagaatcattctcagaaactgctgcgtgatgtgtgcgttcaactctcagagtttagcttttcttttcattcagcggtttggaaacactctgtttgtaaagtctgcacgtggatattttgaccacttagaggccttcgttggaaacgggttttttgcatgtaaggctagacagaagaattcccagtaacttccttgtgttgtgtgcattcaactcacagagttgaacgttcccttagacagagcagatttgaaacactctatttgtccaatttgcaagtgtagatttcaagcgctttaaggtcaacggcagaaaaggaaatatcttcgtttcaaaactagacagaatcattcccacaaactgcgttgtgaggtgttcgttcaactcacagagtttaacctttcttttcatagagcagttaagaaacagtctgtttgtaaattctgtaagtggatattctgacatcttgtggccctcgttggaaacgggatttcttgatattctgctagacagaagaattctcagtaacttccttgtgttgtgtgtattcaactcacagagttgaacgatcctttacacagagcagacttgaaacactgtttttgtggaatttgcaagtggagatttcagccgctttgagttcaatggtagaataggaaatatcttcctatagaaactagacagaatgattctcagaaactcctttgtgatgtgtgtgttcaactcacagagtttaacctttcttttcatagagcagttagtaaacactctgtttataaagtctgcaagtggatattcagacccctttgaggccttcgttggaaacgggatttcttcattttatgctagacagaagaattctcagtaacttccttgtgttgtgtgtattcaactgacagagttgaactttcatttagagagagcagatttgaaacactgtttttgtggaatttgcaagtggagatttcaagcgctttggggccaaaggcagaaaaggaaatatcttcgtgtaaaaactagacagaatcattctcagaaactgctctgcgatgtgtgcgttcaactctcagagtttaactttgcttttcattcagcagtttggaaacactctgtttgtaaagtctgcacgtggataatttgaccacttagaggccttcgttggaaacgggtttttttcatgtaaggctagacagaagaattctcagaaacttcattgtgttgtgtgtattgaactcacagagttgaacaatcctttacacagagcggacttgaaacactctttttgtggaatttgcaagtggagatttcagccgctttgaggtcaatggtagaaaaggaaatatcttcgtatagaaactagacagaatgattctcagaaactcctttgtgatgtgtgcgttcaactcacagagtttaacctttcttttcatagagcagttaggaaacactctgtttgtaaagtctgcaagtggaaattcagacctctttgagaccttcgttggaaacgggatttcttcatattctggtagacagaagaattctcagtaacttcccctgtgttgtgtgtattcaactcacagagttgaacgatcctttacagagagcagacttgaaacactctttttgtggaatttgcaagtggagatttcagccgctttgaggtcaatggtagaataggaaatatcttcccatagaaactagacagaatgattctcagaaactcctttgtgatgtgtgtgttcaactcacagagtttaacctttcttttcatagagcagttagtaaacactctgtttataaagtctgcaagtggatattcagaccccttggaggccttcgttggaaacgggatttcttcatattttgctagacagaagaattctcagtaacttccttgtgttgtgtgtattcaactgacagagttgaactttcatttagagagagcagatttgtaacactgtttttgtggaatttgcaagtggagatttcaagcgctttggggccaaaggcagaaaaggaaatatcttcgtataaaaactagacagaatcattctcagaaactgctctgtgatgtgtgcgttcaactctcagagtttaacatttcttttcattcagcagtttggaaacactctgtttgtaaagtctgcacgtggatattttgaccacttagaggccttcgttggaaacgggtttttttcatgtaaggctagacagaagaattcccagtgacttccttgtgttgtgtgcattcaactcacagagttgaacgttcccttagacagagcagatttgaaacactctatttgtgcaatttgcaagtgtagttttcaagctctttaaggtcaacggcagaaaaggaaatatcttcgtttcaaaactagacagaatcattcccacaaactgcgttgtgatgtgttcgttcaagtcacagagtttaacctttcttttcatagagcagttaggaaacagtctgtttgtcaattctgtaagtggatattctgacatcttgtggccttcgttggaaacgggatttcttcatattctcctagacagaagaattcccagtaacttccttgtgttgtgtgcattcaactcacagagttgaacgatccttcacacagagcagattagaaacactctttttattggaatttgcaagtggagatttcagccgctttgaggtcaacggtagaaaaggaaatatcttcgtataaaaactagacagaatgattctcagaaactcctttgtgatgtgtgtgttcaactcacagagtttaacctttcttttcatagagcagttagtaaacactctgtttataaagtctgcaagtggatattcagacccctttgaggccttcgttggaaacggggtttcttcatattctgctagacagaagaattcccactaacttccttgtgttgtgtgtgttcaactcacagagttgaactttcatttacacagagcagatttgaaacactctttttgtggaatttgcaagtggagatttcaagcgctttgaggccaaaggcagaaaaggaaatatcttcgtttcaaaactagacagaatcattctcagaaactgctctgcgatgtgtgagttcaactctcagagtttaacttttcttttcattcagcagtttggaaacactctgtttgtaaagtctgcacgtggatattttgaccacttagaggccttcgttggaaacgggtttttttcctgtaaggctagacagaagaattcccagtaacttccttgtgttgtgtgtgttcaactcacagagttgaactttcatttacacagagcagatttgaaacactctttttgtggaatttgcaagtggagatgtcaagcgctttaaggtcaatggcagaaaaggaaatatcttagtttcaaaactagacagaatcattcccacaaactgcgttgtgatgtgttcgttcaactcacagagtttaacctttcttttcatagagcagttaggaaacagtctgtttttaaattctgtaagtggatattctgacatcttgtggccttcgttggaaacgggatttgttcatattctgctagacagaagaattctcagtaacttccttgtgttgtgtgtattcaactcacagagttgaacgatcctttacacagagcagtcttgaaacactctttttgtggaatttgcaagtggagatttcagccgctttgaggtcaatggtagaataggaaatatcttcctatagaaactagacagaatgattctcagaaacttctttgtgatgtgtgcgttcaactcacagagtttaacctttcttttcatagagcagttaggaaacactctgtttgtaaactctgcaagtggatattcagacctctttgaggccttcgttggaaacgggatttcttcatactatgctagacaagaagaatcctcagtaacctccttgtgttgtgtgtattcaactgacagagttgaactttcatttagacagagcagatttgaaacactctttttgtggaatttgcaagtggacatttcaagcgcgttgaggccaaaggcagaaaaggaaatatcttcgtataaaaactagacagaatcattctcagaaactgctctgtgatgtgtgcgttcaactctcagagtttaacttttcttttcattcagcagtttggaaacactctgtttgtaaagtctgcacgtggataatttgaccacttagaggccttcattggaaacgggtttttttcatgtaaggctagacagaagaattcccagtaacttccttgtgttgtgtgcattcaactcacagagttgaacgttcccctagacagagcagatttgaaacactctatttgtgcaatttgcaagtgtagttttcaagctcttttaggtcaacggcagaaaaggaaatatcttggtttcaaaactagacagaatgattctcataaactcctttgtgatgtgtgcgttcaactcacagagtttaacctttcttttcatagagcagttaggaaacactctgtttgtaaagtctgcaagtggatattcagacctctttgaggccttcgttggaaacgggatttcttcatattctgctagacaaaagaattctcagtaacttccttgtgttgtgtgcattcaactcacagagttgaacgatcctttacacagggcagacttgaaacactctttttgtggaatttgcaaggggagatttcagcctcattgaggttaatggtagaaaatgaaatatcttcgtatagaaactagacagaatgattctcagaaactcctttgtgatgtgtgcgttcaactcacagagttcaacctttcttttcatagagcagttgggaaacactctgtttgtatagtctgcaagtggatattcagacttctttgaggccttcgttggaagcgggatttcttcatattctgctagacagaagaattctcagtaacttccttgtgctgtgtgtattcaactgacagagttgaactttcatttagagagagcagatttgaaacactgtttttgtggaatttgcaagtggagatttcaagcgctttggggccaaaggcagaaaaggaaatatcttcgtataaaaactagacagaatcattctcagaaactgctgcgtgatgtgtgcgttcaactctcagagtttaacttttcttttcattcagcggtttggaaacactctgtttgtaaagactgcacgtggatattttgaccccttagaggccttcgttggaaacgggtttttttcatgtaaggctagacagaagaattcccagtaacttccttgtgttgtgtacattcaactcacagagttgaacgttcccttagacagagcagatttgaaacactctttttgtgcaattggcaagtggtgatttcagccgctttgaggtcaatggtagaaaaggaaatatcttcgtataaaaactagacagaatgattctcagaaacttcattgtgacgtgtgcgttcaactcacagagtttaacatttcttttcatagagcagttaggaaacactctgtttgtaaagtctgcaagtggatattcagacctctttgaggccttcgttggaaacgggatttcttcatactgtgctagacagaagaattctcagtaacttccttgtgttgtgtgtattcaactcacagagttcaacgatcctttacacagagcagacttgaaacactctttttgtggaatttgcaagtggagatttcagccgctttgaggtcaatggtagaatagggaatatcttcctatagaaactagacagaatgattgtcagaaactcctttgtgatgtgtgcgttcaactcacagactttaacctttcttttcatagagcagttaggaaacactctgtttgtaaagtctgcaagtggatattcagacctccttgaggccttcgttggaaacgggatttcttcatattatgctagacagaagaattctcagtaacttccttgtattgtgtgtattcaactcacagagttgaacgatcctttacacagagcagacttgaaacactcttcttgtggaatttgcaagtggagatttcagccgctttgaggtcaatggtagaataggaaatatcttcctatagaaactagacagaatcattctcagaaactgctctgcgatgtgtgcgttcaactctcagagtttaacttttcttttcattcagcagtttggaaacactctgtttgtaaagtctgcacgtggatattttgaccacttagaggccttcgttggaaacgggtttttttcctgtaaggctagacagtagaattcccagtaacttccttgtgttgagtacattcaactcacagagttgaacgttcccttagacagagcagatgtgaaacactctttttgtgcaattggcaagtggagatttcaagcgctttaaggtcaatggcagaaaaggaaatatcttcgtttcaaaactagacagaatcattcccacaaactgcgttgtgatgtgttcgttcaactcacagagtttaacctttcttttcatagagcagttaggaaacagtctgtttgtaaattctgtaagtggatattatgacatcttgtggccttcgttggaaacgggatttcttcatattctgctagacagaagaattctcagtaacttccttgtgttgtgtgttttcaactcacagagttgaacgatcctttacacagagcagacttgaaacactccttttgtggaatttgcaagtggagatttcagccgctttgaggtcaatggtagaataggaaatatcttcctatagaaagtagacagaatgattctcagaaactcctttgtgatgtgtgtgttcaactcacagagtttaacatttcttttcatagagcagttaggaaacactctgtttgtaaagtctgcaagtggatattcagacctctttgaggccttcgttggaaacgggtttttttcatataaggctagagagaataattctcagtaacttccttgtgttgtgtgtattcaacacacagagttgaacgatcctttacacagagcagacttgaaacactctatttgtagaatttgcaagtggagatttcagccgctttgaggtcaatagtagaaaaggaaatatcttcgtagaaaaactagacagaatgattctcataaactcctttctgatgtgtgcattcaactcacagagtttcacctttcttttcatagagcagttaggaaacactctgtttgtaaagtctgcaagtggatattcagacctccttgaggccttcgttggaaacgggatttcttcttattctgctagacagaagaattcccagtaacttccttgtgttgtgtgtgttcaactcacagagttgaactttcatttacacagagcagatttgaaacactctttttgtggaattcgcaagtggagatttcaagcgctttgaggccaaaggcagaaaaggaaatatcttcgtataaaaactagacagaatcattctcagaaactgctctgcgatgtgtgcgttcaactctcagagtttaacttatcttttcattcagcagtttggaaacactctgtttgtaaagtctgcacgtggataatttgaccacttagaggtcttcgttggaaacgggtttttttcatgtaaggctagacagaagaattcccagtaacttccttgtgttgtgtgtgttcaactcacagagttgaactttcatttacacagagcagatttgaaacactctttttgtggaatttgcaaatggagatttcaagcgctttgaggccaaaggcagaaaaggaaatatcttcgtataaaaagctagacagataatcattctcagaaactgctgtgcgatgtgtgtgttcaactctcagagtttaactttgcttttcattcagcagtttggaaacactctgtttgtaaagtctgcacgtggataatttgaccacttagaggccttcgttggaaacgggtttttttcatgtaaggctggacagaagaattctcagtaacttccttgtgtggtgtgtattcaactcacagagttgaacgatcctttacacagagcagacttgtaaaactctttttgtggaatttgcaagtggagatttcagccgctttgaagtcaaaggtagaaaaggaaatatcttcctataaaaactacacagaatgattctcagaaactcctttgtgatgtgtgcgttcaactcacagagtttaacctttcttttcatagagcagttaggaaacactctgcttgtaaagtctgcaagtggatattcagccctctttgaggccttcgctggaaacgggtttttttcatataaggctagacagaagaattctcagtaacttccttgtgttgtgtgtattcaactcacagagttgaacgatcctttacacagagcagacttgaaacactctttttgtggaatttgcaagtggagatttcagccgctttgagttcaatggtagaataggaaatatcttccctatagaaactagacagaatgattctcagaaactcctttgtgatgtgtgcgttcaactcacagagtttaacctttcttttcatagagcagttaggaaacactctgtttgtaacgtctgcaagtggatattcagacctccttgaggccttcgttggaaacgggatttcttcatattctgctacagagaagaattcccggtaacttccttgtgttgtgtgtgttcaactcacagagttgaactttcatttacacagagcagatttgaaacactctttttgtggaatttgcaaatggagatttcaagcgctttgaggccaaaggcagaaaaggaaatatcttcgtataaaaactagacagaatcattctcagaaactgctctgcgatgtgtgcgttcaactctcagagtttaacttttcttttcattcagcagtttggaaacactctgtttgtaaagtctgcatgtggataacttgaccacttagaggccttcgttggaaacgggtttttttcctgtaaggctagacagaagagttcccagtaacttccttgtgttgtgtgcattcaactcacagagttgaacgttcccttagacagagcagatttgaaacactctatttgtgcaatttgcaagtgtagatttcaagcgctttaaggtcaatggcagaaaaggaaatatcttcgtttcaaaactagacagaatcattcccacaaactgcgttgtaatgtgtgcgttcaactcacagagtttaacctttcttttcatagagcagttaggaaacactctgtttgtaaagtctgtaagtggatattctgacatcttgtggccttcgttggaaacgggatttcttcatattctgctagacagaagaattctcagtaacttccgcgtgttgtgtgtattcaactcacacagttgaacgatcctttacacagagcagacttgaaacactctttttgtggaatttgcaagtggagatttcagccgctttgaggtcaatggtagaaaaggaaatatcttcctataaaaactagacagaatgattctcagaaactcctttgtgatgtgtgcgttcaactcacagagtttaacctttcttttcatagagcagttagaaacactctgtttgtaaagtctgcaagtggatattcagacctccttgaggccttcgttggaagcgggatttcttcatgttcaggtagacagaagaattcccagtaactttccttgtgttgtgtgtgttcaactcacagagttgaactttcatttacacagagcagatttgaaacactctttttgtggaatttgcaagaggagatttcaagcgctttgaggccaaagacagaaaaggaaatatcttcgtataaaaactagacagaatcattctcagaaactgctgcgtgatgtgtgcgttcaactctcagagtttaacttttcttttcattcatcggtttggaaacactctgtttgtaaagtctgcacgtggatattttgaccacttagaggccttcattggaaacgggttttttttcatgtaaggctagacagaagaattcccagtaacttccttgtgtggggtgcattcaactcacagagttgaacgttctcttagacagagcagatttgaaacactctatttgtgcaatttgcaagtgtagatttcaagcgctttaaggtcaatggcagaaaaggaaatatcttcgtttcaaaactagacagaatcattcccacaaactgcgttgtgatgtgttcgttcaactcacagagtttaacctttcttttcatagagcagttaggaaacagtctgtttgtcaattctgtaagtggatattctgacatcttgtggtcttcgttggaaacgggatttcttcatattctgctagacagaagaattctcagtaacttccttgtgttgtgtgtattcaactcacagagttgaaggatcctttacagagagcagacttgaaacactctttttgtggaatttgcaagtggagatttcagccgctttgaggtcaatggtagaaaaggaaatatcttcgtataaaggctagacagaatgattctcagaaactcctttgtgatgtgtgcgttcaacacacagagtttaacttttcttttcatagagaagttagtaaacactctgtttatacagtctgcatgtggatattcagacccctttgaggccttcgttggaaacgggatttcttcatattatgctagacagaagaattcccagtaactttccttgtgttgtgtgtgttcaactcacagagttgaactttgatttacacagagcagatttgaaacactctttttgtggaatttgcaagtggagatttcaagcgctttgtggccaaaggcagaaaaggaaatatcttcgtataaaaactagacagaatcattctcagaaactgctctgtgatgtgtgcgttcaactctcagagtttaacttttcttttcattcagcagtttggaaacactctgtttgtaaagtctgcacgtggataatttgaccacttagaggccttcgttggaaacgggtttttttcatgtaaggctagagagaagaattcccagtaacttccttgtgttgtgtgtattcaactcacagagttgaacgttcccttagacagagcagatttgaaacactctatttgtgcaatttgcaagtgtagatttcaagcgctttatgttcaatggcagaaaaggaaatatcttcgtttcaaaactagacagaatcattcccacaaactgcgttgtgatgtgttcgttcaactcacagagtttaacctttctgttcatagagcagttaggaaacactgtgtttgtaaagtctgtaagtggatattctgacatcttgtggccttcgttggaaaagggatttcttcatattctgctagacagaagaattctcagtaacttccttgtgttgtgtttattcaactcacagagttgaacgatcctttacacagagcagacttgaaacactctttttgtggaatttgcaagtggagatttctgccgctttgaggtcaatggtagaataggaaatatcttcctatagaaactagacagagtgattctcataaactcctttgtgatgtgtgcattcaactcacagagtttaacctttcttttcatagagcagttaggaaacactctgtttgtaaagtctgcaagtggatattcagacctccttgaggccttctttggaaacgggatttcttcatattctgatagacagaagaattcccagtaacttccttgtgttgtgtgtgttcaactcacagagttgaactttgatttacacagagcagattcgaaacactctttttgtggaatttgcaagtggagatttcaagcgctttgaggccaaaggcagaaaaggaaatatcttcgtataaaaactagacagaatcattctcagaaaatgctctgtgatgtgtacgttcaactctcagagtttaacttttcttttcattcagcagtttggaaacactctgtttgtaaagtctgcacgtggatattttgaccacttagaggccttcgttggaaacgggtttttttcatgtaagggtagacagaagaattcccagtaacttccttgtgttgtgtgcattcaactcacagagttgaacgttcccttagacagagcagatttgaaacactctatttgtgcaatttgcaagtgtagatttcaagcgctttaaggtcaacggcagaaaagggaatatcttcgtttcaaaactagacagaatcattcccacaaactgcgttgtgatgtgttcgttcaactcacagagtttaacctttctgttcatacaacagttaggaaacactctgtttgtaaagtctgcaagtggatattcagacctccttgaggccttcgttggaaacgggatttcttcatattctgctagaccgaagaattctcagtaacttccctgtgttgtgtgtattcaactcacagagttgaacgatcctttacacagagcagacttgaaacactctttttgtggaatttgcaagtggagatttcagccgctttgaggtcaatggtagaataggaaatatcttcctatagaaactagacagaatgattctcagaaactcctttgtgatgtgtgcgttcaactcacagagtttaacctttcttttcatagagcagttaggaaacactctgtttgtaaattctgcaagtggatattcagacatctttgaggctttcgttggaaacgggatttcttcatattctgctagacagaagaattctcagtaacttccttgtgttgtgtgtattcaactgacagagttgaacgatcctttacacagagcagacttgaaacactctttttgtggaatttgcaagtggagatttctgccgctttgaggtcaatggtagaataggaaatatcttcctataaaaactagacagaatcattctcagaaactgctctgtgatgtgtgcgttcaactctcagagtttaacttttcttttctttcagcagtttggaaacactctgtttgtaaagtctgcacgtggatattttgaccacttagaggcctgcgttggaaacgggtttttttcatgtaaggctagacagaagaattcccagtaacttccttgtgttgtgtacattcaactcacagagttgaacgttcccttagagagagcagatttgaaatactctttttgtgcaattggcaagtggagatttcaagcgctttaaagtcaatggcagaaaaggaaatatcttcgtttcaaaactagacagaatgattctcagaaacttcattgtgatgtgtgcgttcaactcacagagtttaacctttcttttcatagagcagttaggaaacactgtttttgtaaactctgcaagtggttattcagacctctttgaggccttcgttggaaacgggatttcttcatactgtgctagacagaagaattctcagtaacttccttgcgttgtgtgtattcaactcacagagttgaacgatcttttacagagagcagacttgaaacactctttttgtggaatttgcaagtggagatttcagccgctttgaggtcaatggtagaataggaaatatcttcctatagaaactagacagaatgattctcagaaactcctttgtgatgtgtgcgttcaactcacagagtttaacctttctgttcatagagcagttaggaaacactctgtttgtaaagtctgcaagtggatattcagacctccttgaggccttcgttggaaacaggatttcttcatattatgctagacagaagaattcccagtaacttccttgtgttgtgtgtgttcaactcacagagttgaactttgatttacaaagagcagatttgaaacactctttttgtggaatttgcaagtggagatttcaagcgctttgaggccaaaggcagaaaaggaaatatcttcgtataaaaactagacagaatcattctcagaaactgctgcgtgatgtgtgcgttcaactctcagagtttaacttttcttttcattcagcggtttggaaacactctgtttgtaaagtctgcacgtggaaattttgaccacttagaggccttcgttggaaacgggattttttcatgtaaggctagacagaagaattcccagtaacttccttgtgttgtgtacattcaactcacagagttgaacgttcccttagacagagcagatttgaaacactctttttgtgcaattggcaagtggagatttcaagcgctttgtggtcaatggcagaaaaggaaatatcttcgtttcaaaactacacagaatcattcccacaaactgcgttgtgatgtgttcgttcaactcacagagtttaacctttctgttcatagagcagttaggaaacactctgtttgtaaagtctgtaagtgggtattctgacatcttgtggccttcgttggaaacgggatttcttcatattctgctagacagaataattctcagtaacttaccttgtgttgtgtgtattcaactcacagagttgaacgatcctttacacagagcagacttgaaacactctttttgtggaatttgcaagtggagatttcagccgctttgaggtcaatggtagaataggaaatatcttcctatagaaactagacagaatgattctcagaaaatcctttgtgatgtgtgcgttcaactcacagagtttaacatttcttttcatagagcagttaggaaacactctgtttgtaaagtctgcaagtggatattcagacctctttgaggccttcgttggaaacgggatttcttcatattctgctagacagaagaattctcagtaacttccttgtgttgtgtgtattcaactgacagagttgaactttcatttagagagagcagatttgaaacactgtttttgtggaatttgcaagtggtgatttcaagcgctttggggccaaaggcagaaaaggaaatatcttcgtataaaaactagacagaatgattctcagaaactgctctgcgatgtgtgcgttcaactctcagagtttaacttttcttttcattcagcagtttggaaacactctgtttgtaaagtctgcacgtggatattttgaccacttagaggccttcgttggaaacgggtttttttcctgtaaggctagacagaagaattcccagtaacttccttgtgttgtgtgcattcaactcacagagttgaacgttcccttagacagagcagatttgaaacactctatttgtgcaatttgcaagtgtagatttcaagcgctttaaggtcaatggcagaaaaggaaatatcttcgtataaaaactagtcagaatcattcccacaaactgcgttgtgatgtgttcgttcaactcacagagtttaacctttcttttcatagagcagttaggaaacagtctgtttgtcaattctgtaagtggatattctgacatcttgtggccttcgttggaaacgggttttcttcatattctcctagacagaagaattctcagtaacttccttgtgttgtgtttattcaactcacagagttgaatgatcctttacacagagcagacttgaaactctctttttgtggaatttgcaagtggagatttcagccgctttgaggtcaatggtagaaaagcaaatatcttcgtataaagactagacagagtgattctcagaaactcctttgtgatgtctgcgtttaactcacagagtttaacctttcttttcatagagcagttaggaaacactctgtttgtaaagtctgcaagtggatattcagacctccttgaggccttcgttggaaacgggatttcttcatattatgctagacacaagaattctcagtaacttccttgtgttgtgtgtattcaactgacagagttgaactttcatttagagagagcagatttgaaacactgtttttgtggaatttgcaagtggagattttaagcgctttggggccaaaggcagaaaaggatatatcttcgtataaaaactagacagaatcattctcagaaactgctgcgtgatgtgtgcattcaactctcagagtttaacttttcttttcattcagcggtttggaaacactctgtttgtaaagtctgcacgtggaaattttgaccacttagaggccttcgttggaaacgtgtttttttcatgtaaggctagacagaagaattcccagtaacttccttgtgttgtgtgcattcaactcacagagttgaacgttcccttagacagagcagatttgaaacactctatttgtgcaatttgcaagtgtagttttcaagctctttaaggtcaacggcagaaaaggaaatatcttcgtttcaaaactagacagaatcattcccacaaactgcgttgtgatgtgttcgttcaactcacagagtttaaactttcttttcatagagcagttaggaaacagtctgtttgtcaattctgtaagtggatattctgacatctagtggccttcgttggaaacgggatttcttcatattctgctagacagaagaattctcagtaacttccttgtgttgtgtgtattcaactcacagagttgaacgatcgtttacacagagcaatcatgaaacactctttttgtggaatttgcaagtggagatttctgccgctttgaggtcaatggtggaataggaaatatcttcctatagaaactagacagaatgattctcagaaactcctttgtgaagtgtgcgttcaactcacagagtttaacctttcttttcatagagcagttaggaaacactctgtttgtaaagtctgcaagtggatattcagacctctttgaggccttcgttggaaacgggtttttttcatataaggctagacagaagaattcccagtaacttccttgtgttgtgtgtgttcgactcacagagttgaactttcatttacacagagcagatttgaaacactctttttgtggaatttgcaagtggagatttcaagcgctttgaggcccaaggcagaaaaggaaatatcttcgtttcaaaactagacagaatcattctcagaaactgctctgcgatgtgtgcgttcaactctcagagtttaacttttcttttcattcagcagtttggaaacactctgtttgtaaagtctgcacgtggataatttgaccacttagaggccttcgttggaaacgggttttttcatgtaaggctagacagaagaattcccagtaacttccttgtgttgtgtacattcaactcacagagttgaacgttcccttagacagagcagatttgaaacactctttttgtgcaattggcaagtggagatttcaagtgctttaaggtcaatggcagaaaaggaaatatcttcgtttcaaaactagacagaatcattcccacaaactgcgttgtgatgtgttcgttcaactcacagagtttaacctttcttttcatagagcagttaggaaacagtctgtttgtaaattctgtatgtggatattctgacatcttgtggccttcgttgcaaacgggatttcttcatattctgcttgacagaagaaatctcagaatcttccttgtgttgtgtgtattcaactcacagagttgaacgatggtttacaaagagcagatatgaaacactctatttgtggaatttgcaagtggagatttcagccgctttgaggtccatggtagaaaaggaaatatcttcgtataaaaactagacagaaagattctcagaaattcctttgtgatgtgtgcgttcaactcacagagtttaacctttcttttcatagagcagttaggaaacactctgtttgtaaagtctgcaagtggatattcagacctctttgaggccttcgttggaaacgggtttttttcatataaggctagacagaagaattctcagtaacttccttgtgttgtgtgtattcaactgacagagttgaactttcatttagagagagcagatttgaaacactgtttttgtggaatttgcaagtggagatttcaagcgctttggggccaaaggcagaaaacgaaatatcttcttataaaaactagacagaatcattctcagcaaactcctttgtgatgtgtgcgttcaactctcagaatttaacttttcttttcattcagcggtttggaaacactctgtttgtaaagtctgcacgtggaaattttgaccacttaggggccttcgttggaaacgggtttttttcatgtaaggctagacagaagaattcccagtaacttccttgtgttgtgtgcattcaactcacagagttgaaagttcccttagacagaccagatttgaaacactctatttgtgcaatttgcaagtgtagatttcatgcgctttgaggtcaatggcagaaaaggaaatatcttcgtttcaaaactagacagaatcattcccacaaactgcgttgtgatgtgttcgttcaactcacagagtttaacctttctgttcatagagcagttaggaaacactctgtttgtaaagtctgcaagtggatattcagacctccttgaggccttcgttggaaacgggatttcttcatattctgctagaccgaagaattctcagtaacttccttgtgttgtgtgtattcaactcacagagttgaacgatcctttacacagagcagacttgaaacactctttttgtggaatttgcaaggggagatttcagccgctttgaggtcaatggtagaaaaggaaatatcttcgtataaaaactagacagaatgattctcagaaacttcattgtgatgtgtgcgttcaactcacagagtttaacctttcttttcatagagcagttaggaaacactctgtttgtgaactctgcaagtggatattcagacgtctttgaggccttcgttggaaacgggatttcttcatactatgctagacagaagaattctcagtaacttcccttgtgttgtgtgtattcaactcacagagctgaactttcatttacacagagcagatttgaaacactctttttgtggaatttgcaaatggagatttcaagcgctttgaggccaaaggcagaaaaggaaatatcttcgtataaaaactagacagaatcattctcagaaactgctctgcgatgtgtgcgttcaactctcagagtttaacttttcttttcattcagcagtttggaaacactctgtttgtaaagtctgcacgtggatattttgaccacttagaggcctttgttggaaacgggttttttcctgtaaggctagacagaagaattcccagtaacttccttgtgttgtgtacggttcaactcacagagttgaacgttcccttagacagagcagatttgaaacactctttttgtgcaattggcaagtggagatttcaagcgctttaaggtcaatggcagaaaaggaaatatcttcgtttcaaaactagacagaatgattctcagaaacttctttgtgatgtgtgcgttcaactcacagagtttaacctttcttttcatagagcagttaggaaacactctgtttgtaaagtctgcaagtggatattcagatctctttgaggccttcgttggaaatgggatttcttcatactatgctagacagaagaattctcagtaacttccttgtgttgtgtgtattcaactcacagagttgaacgatcctttacacagagcagacttgtaacactctttttgtggaatttgcaagtggagatttcagccgctttgaagtcaaaggtagaaaaggaaatatcttcctataaaaaatagactgaatgattctcataaactcctttgtgatgtgtgcgttcaactcacagagtttaacctttcttttcatagagcagttaggaaacactctgtttgtaaagtctgcaagtggatattcagacctccttgaggccttcgttggaaaagggatttcttcatattctgctagacagaagaattctcagtaacttccttgtgttgtgtgtattcaactcacagagttgaacgatcctttacacagagcagacttgaaacactctttttgtggaatttgcaagtggagatttcagcccgctttgaggtcaatggttgaaaaggaaatatcttcgtataataaactagacagaatcattctcagaatctgctgcgtgatgtgtgcattcaactctcagagtttaacttttcttttcattcagcggtttggaaacactctgtttgtaaagtctgcacgtggatattttgaccacttagaagccttctttggaaacgggttttcttcatgtaaggctagacagaagaattcccagtaacttccttgtgttgtgttcattcaactcacagagttgaacgttcccttagacagagcagatttgaaacactctttttgtgcaattggcaagtggagatttcaagcgctttaaggtcaatggcagaaaaggaaatatcttcgtttcaaaactagacagaatcattcccacaaactgcgttgtgatgtgttcgttcaactcacagagtttaacctttcttttcatagagcagttaggaaacagtctgtttgtaaattctgtaagtggatattctgacatcttgtggccttcgttggaaacgggatttcttcatattctgctagtcagaagaattctcagtaacttccttgtgtagtgtgtattcaactcacagagttgaacgatcctttacacagagcagacttgaaacactctttttgtggaatttgcaagtggagatttcagccgctttgaggtcaatggtagaaaaggaaatatcttcgtataaagactagacagaatgattctcagaaactcctttgtgatgtgtgcgttcaactcacagagtttaacttttcttttcatagagcagttaggaaacactctgtttgtaaagtctgcaagtggatattcagacctctttgaggccttcgttggaaacgggatttcttcatattatggtagacagaagaattctcagtaacttccttgtgttgtgtgtattcaactcacagagttgaacgatcctttacacagagcagacgtgaaacactctttttgtggaatttgcaagtggagatttcagccgctttgaggtcaatagtagaaaaggaaatatcttcgtagaaaaactagacagaatcattctcagaaactgctctgcgatgtgtgcgttcaactctcagagtttaacttttcttctcattcagcagtttggaaacactctgtttgtaaagtctgcacgtggatattttgaccacttagaggccttcgttggaaacgggtttttttcctgtaaggctagacagaatcattctcagaaactgctctgcgatgtgtgcattcaactctcagagtttaacttttcttttcattcagcagtgtggaaacactctgtttgtaaagtctgcacgtggatattttgaccacttagaggccttcgttggaaacgggtttttttcctgtaaggctagacagaagaattctcagtaacttccttgtgttgtgtgtattcaactcacagagttgaacgacgctttacagagagcagacttgaaacactctttttgtggaatttgcaagtggagatttcagccgcttgaggtcaatggtagaaaaggaaactatcttcgtataaagactagacagaatgattctcagaaactcctttgtgatgtgtgtgttcaactcacagagttgaacctttcttttcatagagcagttagtaaacaatctgtttataaagtctgcaagtggatattcagatccctttgaggccttcgttggaaacgggatttcttcatattatgctagacagaagaattctcagtaacttccttgtgttgtgtgtattcaactgacagagttgaactttcgtttagagagagcagatttgaaacactgtttttgtggaatttgcaagtggagatttcaagcgctttggggccaaaggcagaaaaggaaatatcttcgtataaaaactagacagaatcattctcagaaactgctctgcgatgtgtgcgttcaactcttagagtttaacttttcttttcattcagcagtttggaaacactctgtttggaaagtctgcacgtggataatttgaccacatagaggccttcgttggaaacgggtttttttcatgtaaggctagacagaagaattcccagtaacttccttgtgttgtgtacattcaactcacagagttgagacgttcccttagaccgagcagatttgaaacactctttttgtgcaattggcaagtggagatttcaagcgctttaaggtcaatggcagaaaaggaaatatcttcgtttcaaaactagacagaatgattctcataaactcctttgtgatgtgtgcgttcaactcacagagtttaacctttcttttcatagagcagttagtaaacactctgtttggaaagtctgcaagtggatattcagacctctttgaggccttcgttggaaacgggatttcttcatattctgctagacagaagaattctcagtaacttcccttgtgttgtgtgtattcaactcacagagttgaacgatcctttacacagagcagacttgaaacactctttttgtggaatttgcaagtggagatttcagccgctttgaggtcaatagtagaaaaggaaatatcttcgtagaaaaactagacagaatgattctcagaaactcctttgtgatgtgtgcgttcaactcacagagtttaacctttcttttcatagagcagttaggaaacactctgtttgtaaagtctgcaagtggatattcagacctccttgaggccttcgtttgaaacgggatttcttcatattatgcaagacagaagaattcccagtaacttcttgtgttgtgtgtgttcaactcacagagttgaactttcatttacccagagcagatttgaaacactctttttgtggaatttgcaagtggagatttcaagcgctttgaggccaaaggcagaaaaggaaatatcttcgtttcaaaactagacagaatcattctcagaaactgctgcgtgatgtgtgcgttcaactctcagagtttaacttttcttttcattcagcggtttggaaacactctgtttgtaaagtctgcacgtggatattttgaccacttataggccttcgttggaaacgggtttttttcatgtaaggctagacagaagaattctcagtaactaccttgtgttgtgtgtattcaactcacagagttgaacgatcctttacacagagcagacttgaaacactctatttgtgcaatttgcaagtgtagatttcaagcgctttaaggtcaatggcagaaaaggaaatatcttcgttttaaaactagacagaatcattcccacaaactgcgttgtgatgtgttcgttcaactcacagagtttaacctttctgttcatagagcagttaggaaacactctgtttgtaaagtctgtaagtggatatcctgacatcttgtggccttcgttggaaacgggatttcttcatattctgctagacagaagaattctcagtaacttccttgtgttgtgtgtattgaactcacagagttgaacgatcctttacacagagcagacttgaaacactctttttgtggaatttgcaagtggagatttcagccgctttgaggtcaatggtagaataggaaatatcttcctatagaaactagacagaatgattctcagaaagtcctttgtgatgtgtttgttcaactcacagagtttaacctttcttttcatagagcagttaggaaacactctgtttgtaaagtctgcaagtggatattcagacctctttgaggacttcgttggaaacgggatttcttcatattctgctagacagaagaattcccagtaacttccttgtgttgtgtgtgttcaactcacagagttgaactttcatttacacagagcagatttgaaacactctttttgaggaatttgcaagtggagatgtcaagcgctttgaggccaaaggcagaaaaggaaatatcttcgtttcaaaattagacagaatcattcccacaaactgcgttgtgatgtgttcgttcaactcacagagtttaatctttcttttcatagagcagttaggaaacactctgttggtaaattatgtaagtggatattctgacatcttgtggcctccgttggaaacgggatttcttcatattctgctagacagaagaattctcagaatcttccttgtgttgtgtgtattcaactcacagagttgaacgatcctttacacagagcagacttgaaacactctttttatggaatttgcaagtggagatttcagccgctttgaggtcaatggtagaaaaggaaatatcttcgtataaaaactagacagaatcattctcagaaactgctctgcgatgtgtgcgttcaactctcagagtttaatttttcttttcattcagcagtttggaaacactctctttgtaaagtctgcacgtggatattttgaccacttagaggccttcgttggaaacgggttttattcctgtaaggctagacagaagaattcccagtaacttccttgtgttgtgtgcagtcaactcacagagatgaacgttccctttgacagagcagatttgaaacactctatttgtgcaatttgcaagtgtagatttcaagcgctttaaggtcaatggcagaaaaggaaatattttcgtttcaaaactagacagaatcattcccacaaactgcgttgtgatgtgttcattcaactcacagagtttaaccattcttttcatagagcggttaggaaacactctgtttataaagtctgcaagtggatattcagaccttttgaggccttcgttggaaacgggatttcttcatatgatgctagacagaagaattcccagtaacttccttgtgttgtgtgtgttcaactcacagagttgaaatttcatttacacagagcagacttgtaacactctttttgtggaatttgcaagtggagatttcagccgctttgaagtcaaaggtagaaaaggaaatatcttcgtataaaaactagacagaatgattctcagaaactcctttgtgatgtgtgcgttcaactctcagagttcaacttttcttttcattcagcagtttggaaacactctgtttgtaaagtctgcacgtggatattttgaccacttagaggccttcgttggaaacgggtttttttcctgtaaggctagacagaagaattcccagtaacttcccttgttttgtgtacattcaactcacagagttgaacgttcccttagatagagcagatttgaaacactctttttgtgcaattggctagtggtgatttcagccgctttgaggtcaatggtagaaaaggaaatatcttcgtataaaaactagacagaatcattcccacaaactgcgttgtgatgtgttcgttcaactcacagagtttaacctttctgttcatagagcagttaggaaacactctgtttgtaaagtctgcaagtggatattcagacctccttgaggccttcgttggaaatgggatttcttcatattctgctagacagaataattctcagtaacttccttgtgttgtgtgtattcaactcacagagttgaaggatcctttacagcgaacaggcttgaaacactctttttgtcgaatttgcaagtggagatttcagccgctttgaggtcaatggtagaataggaaatatcttcttatagaaactagacaaaatgattctcagaaacttctttgtgatgtgtgcgttcaactcacagagtttaacctttcttttcatagagcagttaggaaacactctgtttgtaaactctgcaagtggatattcagacctctttgaggccttcattggaaacgggatttctccatactatgctagacagaagaattctcagtaacttccttgtgttgtgtgtattcaactcacagagttgaacgatcctttacacagagcagacttgaaacactctttttgtggaatttgcaagtggagatttcaaccgctttgaggtcaatggtagaaaaggaaatatcttcgtataaagactagacagaatgattctcataaactcctttgtgatgtgtgcggtcaactcacagagtttaacttttcttttcatagagcagttaggaaacactctgtttgtaaagtgtgcaagtggatattcagacctctttgaggccttcgttggaaacaggatttcttcatattatgctagacagaagaattcccaggaacttccttgtgttgtgtacattcaactcacagagttgaacgttcccttagacagagcagatttgaaacgctctttttgtgcaattggcaagtggtgatttcagcctctttgaggtcaatggtagaaaaggaaatatcttcgtataaaaactagacagaatcattcccacaaactgcgttgtgatgtgttcgttcaactcacagagtttaacctttcttttcatagagcagttaggaaacactctgttggtaaaatctgtaagtggatattctgacatcttgtggccttcgttggaaacgggatttcttcatattctgctagacagaagaattctcagaaacttccttgtgttgtgtgtattcaactcatagagttgaacgatcgtttacacagagcagacttgagaaattctttttgtggaatttgcaagtggagatttcagccgctttgaggtcaatggtagaaaaggaaatatcttcatataaaaactagacagaatgattctcagaaactcctttgtgatgtgtgagttcaactcacagagtttaacctttcttttcatagagcagttaggaaacactctgtttgtaaagtctgcaagtggatattcagacctctttgaggccttcgttggaaacgggatttcttcatattctgctgagacagaagaattctcagtaacttccttgttttgtgtgtattcaactcacagttaaacgatcctttacacagagcagacttgaaacactctttttgtggaatttgcaagtggagatttcagccgctttgaggtcaatagtagaaaaggaaatatcttcgtagaaaaactagacagaatcattctcagaaactgctctgtgatgtgtgcgttcaactctcagagtttaacttttcttttcattcagcagtttggaaacactctgtttgtaaagtctgcatgtggatattttgagcacttggaggccttcgttggaaacgggtttttttcatgtaaggctagacaggagaattcccagtaacttccttgtgttgtgtgcattcaactcacagagttgaacgttccgttagacagagcagatttgaaatactctatttgtgcaatttgcaactgtagatttcaagcgttttaaggtcaatggcagaaaaggaaatatcttcgtataaaaactagtcagaatcattcccacaaactgcgttgtgatgtgttcgttcaactcacagagtttaacctttcttttcatagagcagttaggaaacactctgttggtaaattctgtaagtggatattctgacatcttgtggcctccgttggaaacgggatttcttcatattctgctagacagaataattctcagtaacttccttgtgttgtgtgtattcaactcacagagttgaacgatcctttacagagagcagacttgaaacacgctttttgtggaatttgcaagtggagatttcagccgctttgaggtcaatggtagaataggaaatatcttcctatagaaacaagacagaatgattctcagaaactcctttgtgatgtttgcgttcaactgacagagtttaacctttcttttcatagagcagttaggaaacactctgtttgtaaagtctgcaagtggatattcagacctctttgagtccttcgttggaaacgggatttcttcatattctgctagacagaagaattcccagcaacttccttgtgttgtgtgtgttcaactcacagagttgaactttcatttacacagagcagatttgaaacactctttttgtggaatttgcaagtggagatttcaagcgctttgaggccaaaggcagaaaaggaaatatcttcgtataaaaactagacagaatcattctcagaaactgctgcgtgatgtgtgcgttcaactctcagagtttaacttctcttttcattcagcggtttggaaacactctgtttgtaaagtctgcacgtggatattttgaccacttagaggccttcgttggaaacgggtttttttcatgtaaggctagacagaagaattcccagtaacttccttgtgttgtgtgcattcaactcacagagttgaacgttcccttagacagagcagatttgaaacactctatttgtgcaatttgcaagtgtagatttcaagcgctttaaggtcaatggcagaaaaggaaatatcttcgtttcaaaactagacagaatcattcccacaagctgcgttgtgatgtgttcgttcaactcacagagtttaacctttctgttcatagagcagttaggaaacactctgtttgtaaagtctgtaagtggatattctgacatcttgtggccttcgttgcaaacgggatttcttcatattctgctagacagaagaattctcagtaacttccttgtattgtgagtattcaactcacagagttaaacgatcctttacacagagcagacttgaaacactctttttgtggaatttgcaagtggagaattcagccgctttgaggtcaatggtagaatagtaaatatcttcctatagaaaattgacagaatgattctcagaaactcctttgtgatgtgtgcgttcaactcacagagtttaacctttcttttcatagagcagttaggaaacactctgtttgtaaagtctccaagtggatattcagacctctttgaggccttcgttggatacgtgtttttttcatataaggctagacagaagaattcccagtaacttccttgtgatgtgtgtgttcaactcacagagttgaactttcatttacacagagcagatttgaaacactctttttgtggaatttgcaagtggagatttcaagcgctttgaggccaaaggcagaaaaggaaatatcttcgtttcaaaactagacagaatcattctcagaaactgctctgcgatgtgtgcgttcaactctcagagtttaacttttcttttcattcagcagtttggaaacactgtgtaaagtctgcacgtggataatttgaccacttagaggccttcgttggaaacgggtttttttcatgtaaggctagacagaagaattcccagtaacttccttgtgttgtgtgcattcaactcacagagttgaacgttcccttagacagagcagatttgaaacactctatttgtgcaatttgcaagtgtagatttcaagcggtttaaggtcaacgccagaaaaggaaatatcttcgtttcaaaactagacagaatcattcccacaaactgcgttgtgatgtgttcgttcaactcacagagtttaaactttctgttcatagagcagttaggaaacactctgtttttaaagtctgccagtggatattcagacctctttgaggccttcgttggaaacgggatttcttcatattctgctagacagaagaattctcagaaacttccttgtgttctgtgttttcaactcacagagttgaacgatgctttacacagagtagacttgaaacactcttgtggaatttgcaagtggagatttcatccgctttgaggtcaatggtagaataggaaatatcttcctatagaaactagacagaatgattctcagaaactcctttgagatgtgtgcgttcaactcacagagtttaacctttcttttcatagagcagttaggaaacactctgtttgtaaagtctgcaagtggatattcagacctctttgaggccttcgttggaaacgggatttcttcatattcttctagagagaagaattcccagtaacttccttgtgttgtgtgtgttcaactcacagagttgaactttcatttacacagagcagatttgaaacactctttttgtggaatttgcaagtggagatttcaagcgctttgaggccaaaagcagaaaaggaaatatcttcgtataaaaactagacagaaatcattctcagaaactgctctgcgatgtgtgcgttcaactctcagagtttaacttttcttttcattcagcagtttggaaacactctgtttgtaaagtctgcacgtggatattttgaccacttagaggccttcgttggaaacgggtttttttcctgtaaggctagacagaagaattcccagtaccttccttgtgttgtgtacattccactcacagagttgaacgttcccttagacagagcagatttgaaacactctttttgtgcaattggcaagtggagatttcaagcgctttaaggtcaatggcagaaaaggaaatatcttcgtttcaaaactagacagaatcattcccacaaactgcgttctgatgtgttcgttcaactcacagagtttaacctttctgttcatagagcagttaggaaacactctgtttgtaaagtctgtaagtggatattctgacatcttgtggccttcgttggaaacgggatttcttcatattctgctagacagaagaattctcagtaacttcccttgtgttgtgtgtattcaactcacagagttgtacgatcctttacacagagcagacttgaaacactctttttgtggaatttgcaagtggagatttcagccgctttgaggtcaatggtagaataggaaatatcttcctatagaaacgagacagaatgattctcagaaactcctttgtgatgtgtgcgttcaactcacagagtttaacctttcttttcatagagcagttaggaaacactctgtttgtaaagtctgcaagtggatattcagacatccttgaggctttcgttggaaacgggatttcttcatattctgcaagaaagaagaattctcagtaacttccgcgtgttgtgtgtattcaactcagagagttgaacgatcctttacacagagcagacttgaaacaccctttttgtggaatttgcaagtggagatttcagccgctttgtggtcaatggtacaaaaggaaatatcttcctataaaaactagacagaatcattctcagaaactgctgcgtgatgtgtgcgatcaactctcagagtttaacttttcttttcattcagcggtttggaaacactctgtttgtaaagtctgcacgtggaaattttgacaacttagagaccttcgttggaaacgggattttttcatgtaaggctagacagaagaattcccagtaacttccttgtgttgtgtgcattcaactcacagagttgaacgttcccttagacagagcagatttgaaacactctatttgtgcaatatgcaagtgtagttttcaagctctttaaggtcaacggcagaaaaggaaatatcttggtttcaaaactagacagaatgattctcagaaactcctttgtgatgtgtgcgttcaactcacagagtttaccctttcttttcatagagcagttaggaaacactctgtttgtaaagtctgcaagtggatattcagacatccttgaggcgttcgttggaaacgggatttcttcatattctgccagaaagaagaattctcagtaacttccttgtgttgtgtgtattcaactcacagagttgaacgatccattacacagagcagacttgagacactctttttgtggaatttgcaagtggagatttcagccgctttgaggtcaatggtagaaaaggaaatatcttcgtataaagactagacagaatgattctcagaaaatcttttgtgatgtgtgcgttcaactcacagagtttaacttttcttctcatagagcagttaggaaacactctgtttgtaaagtctgcaagtggatattagacctctttgaggccttcgttggaaacgggatttcttcatattatgctagacagaagaaatcccagtaacttccttgtgttgtgtgttttttaagtcacagagttgaactttcatttacacagagcagatttgaaacactctttttgtggaatttgcaagtggagatttcaagtgctttgaggccaatggcagaaaaggaaatatcttcgtataaaaactagacagaatcattctcagaaactgctctgtgatgtgttcgttcaactctcagagtttaacttttcttttcattcagcagtttggaaacactctgtttgtaaagtctgcacgtggataatttgaccacttagaggccttcattggaaacgggtttttttcatgtaaggctagacagaagaattcccagtaacttctttgtgttgtgtacattcaactcacagagttgaacgttcccttagacagagcagacttgtaacagtctttttgtggaatttgcaagtggagatttcagccgctttgaagtcaaaggtagaaaaggaaatatcttcctataaaaactagacagaatcattcccacaaactgcgttgtgatgtgttcgttcaactcacagagtttaacctttcttttcgtagagcagttaggaaacactctgtttgtaaagtctgcaagtggatattcagacctctttgaggccttcgttggaaacgggatttcttcatattctgctagacagaataattctcagtaacttccttgtgttgtgtgtattcaactcacagagttgaacgatcctttacagagagcagacttgaaacactctttttgtggaatttgcaagtggagatttcagccgctttgaggtcaatagtagaataggaaatatcttcgtagaaaaactagacagaatgtttctcagaaactcctttgagatgtgtgtgttcaactcacagagtttaacctttcttttcatagagcagttaggaatcactctgtttgtaaagtctgcaagtggatattcagacctctttgaggccttcgttggaaacgggtttttttcatataaggctagacagaagaattcccagtaacttccttgtgttgtgtgtgttcaactcacagagctgaactttcatttaaacagagcagatttgaaacactctttttgtggaatttgcaagtggagatttcaagcgctttaaggccaaaggcagaaaaggaaatatcttcgtataaaaactagacagagtgattctcagaaactcctttgtgatgtgtgcgttcaactcacagagtttaacctttcttttcattcagcggtttggaaacactctgtttgtaaagtctgcacgtggatattcagacctctttgaggccttcgttggaaacgggtttttttcatgtaaggctagacagaagaattcccagtaacttccttgtgttgtgtgcattcaactcacagagttgaacgttccttagagagagcagatttgaaacactctatttgtgcaatttgcaagtgtagatttcaagcgctttaaggtcaatggcagaaaaggaaatatcttcgtttcaaaactagacagaatgattctcagaaactcctttgtgatgtgtgcgtttaactcacagagtttaacctttcttttcatagagcagttaggaaacactctgtttgtaaagtctgcaagtggatattcagacctccttgaggccttcgttggaaacgggatttcttcatattatgctagacagaagaattctcagtaacttccttgtgttgtgtgtattcaactcacagcagttgaacgatcctttacacagagcagacttgaaacactctttttgtggaatttgcaagtggagatttcagccgctttgagttcaatggtagaataggaaatatcttcctatagaaactagacagaatgattctcagaaactcctttgtgatgtgtgcgttcaactcacagagtttaacctttcttttcatagagcagttaggaaaaactgtgtttgtaatgtctgcaagtggatattcagacatctttgaggctttcgttggaaacgggatttcttcatattatgctagacagaagaattcccagtaacttccttgtattgtgtgtgttcaactcacagagttgaactttcatttacccagagcagatttgaaacactctttttgtggaatttgcaagtggagatttcaagcgctttgaggccaaaggcagaaaaggaaatatcttcgtttcaaaactagacagaatcattctcagaaactgctctgcgatgtgtgcgttcaactcacagagtttaacctttcttttcatagagcagttaggaaacactctgtttgtaaagtctgcaagtggatattcagacctctttgaggccttcgttggaaacgggatttcttcatataaggctagacagaagaattctcagtaacttccttgtgttgtgtacattcaactcacagagttgaacgttcccttagacagagcagacttgtaacactctttttgtggaatttgcaagtggagatttcagccgctttcaagtcaaaggtagaaaaggaaatatcttcctataaaaactagacagaatcattcccacaaactgcgttgtgatgtgttcgttcaactcacagagtttaacctttcttttcatagagcagttaggaaacactctgttggtaaattctgtaagtggatattctgacatcttgtggccttcgttggaaacgggatttcttcatattctgctagacagaagaattctcagtaacttccttgtgttgtgtgtattcaactcacagagttgaacgatcctttacacagagcagacttgaaacactctttttgtagaatttgcaagtggagatttcagccgctttgaggtcaatggtagaaaaggaaactatcttcatataaagactagacagaatgattctcagaaactcatttgtgatgtgtgcgttcaactcacagagtttaacctttcttttcatagagcagttaggaaacactctgtttttaaagtctgcaagtggatattcagacctttttgaggccttcgttggaaacgggatttcttcatatgatgctagacagaagaattcccagtaacttccttgtgttgtgtgtattcaactcacagagttgaactttcatttacacagagcagatttgaaacactctttttgtggaattttcaaatggagatttcaagcgctttgaggccaaaggcagaaaaggaaatatcttcgtataaaaactagacagaatcattctcagaaactgctctgcgatgtgtgcgttcaactctcagagtttaacttttcttttcattcagcagtttggaaacactctgtttgtaaagtctgcacgtggatattttgaccacttagaggccttcgttggaaacgggtttttttcatggaaggctagacagaagaattctcagtaacttccttgtgttgtgtgtattcaactcacagagttgaacgatcctttacacagagcagacttgtaacactctttttgtggaatttgcaagtggagatttcagccgctttgaagtcaaatgtagaaaaggaaatatcttcctttaaaaactagacagaatcattcccacaaagtgcgttgtgatgtgttcgttcaactcacagagtttaacctttctgttcatagagcagttaggaaacactctgtgtgtaaagtctgcaagtggatattcagacctctttgaggccttcgttggaaacgggatttcttcatattctgctagacagaagaattctcagaaacttccttgtgttgtgtgttttcaactcacagagttcaacgatcctttacacagagcagacttgaaacactctttttgtggaatttgcaagtggagatttcagccgctttgaggtcaatggtagaataggaaatatcttcctatagaacctagacagaatgattctcagaaaatcttttgtgatgtgtgcgttcaactcacagagtttaacttttcttctcatagagcagttaggaaacactctgtttgtaaagtctgcaagtggatattcagacctctttgaggccttcgttggaaacgggatttcttcatattttgctagacagaagaattcccagtaacttccttgtgttgtgtgtgttcaactcacagagttgaactttcatttacacagagcagatttgaaacactctttttgtggaatttgcaagtggagatttcaagcgctgtgaagccaaaggcagaaaaggaaatatcttcgtataaaaactagacagaaatcattctcagaaactgctctgcgatgtgtgcgttcaactctcagagtttaacttttcttttcattcagcagtttggaaacactctgtttgtaaagtctgcacgtggatattttgaccacttagagtccttcgttggaaacgggtttttttcatgtaaggctagacagaagaattcccagtaacttcccttgtgttgtgtacattcaactcacagagttgaacgttcccttagacagagcagatttgaaacactctttttgtgcaattggcaagtggagatttcaagcgctttaaggtcaatggcagaaaaggaaatatcttcgtttcaaaactagagagaatgattctcagaaactcctttgtgatgtgtgcgttcaacacacagagtttaacttttcttttcatagagcagttaggaaacactctgtttgtaaagtctgcaagtggatattcagacctccttgacgccttcgttggaaacgggatttcttcatattctgctagacagaagaattctcagtaacttccttgtgttgtgtgtattcaactcacagacttgaacgatcctttacacagagcagacttgaaacactctttttgtggaatttgcaagtggagatttcagccgctttgaggtcaatagtagaaaaggaaatatcttcgtagaaaaactagacagaatgattctcagaaactcctttgtgatgtgtgcgttcaactcacagagtttaaactttcttttcatagagcagttaggaaacactctgtttgtaaagtctgcaagtggatattcagacctccttgaggccttcgttggaaacgggatttcttcatattatgctagacagaagaattctcagtaacttccttgtgttctgtgtattcaactgacagagttgaactttcatttagagagagcagatttgaaacactgtttttgtggaatttgcaagtggagatttcaagcgctttggggccaaaggcagaaaaggaaatatcttcgtataaaaactagacagaatcattctcagaaactgctctgcgatgtgtgcgttcaactctcagagtttaacttttcttttcattcagcagtttggaaacactctgtttgtaaagtctgcacgtggatattttgatcacttagaggccttcgttggaaacgggtttttttcctgtaaggctagacagaagaattaccagtaacttccttgtgttgtgtacattcaactcacagagttgaacgttcccttagacagagcagatttgaaacactctttttgtgcaattggcaagtggtgatttcagccgctttgaggtcaatggtagaaaaggaaatatcttcgtataaaaactagacagaatcattcccacaaactgcgttgtgatgtgttcgttcaactcacagagtttaacctttctgttcatagagcagttaggaaacactgtgtaaagtctgttagtggatattctgacatcttgtggccttcgttggaaacgggatttcttcatattctgctagacagaagaattctcagtaacttccttgtgttgtgtgtattcaactcacagagttgaacgatcctttacacagagcagacttgaaacactctttttgtggaatttgcaagtggagatttcagccactttgaggtcaatggtagaaaaggaaatatcttcgtataaagactagacagaatgattctcagaaactcctttgtgatgtgtacgttcaactcacagagtttaacctttcttttcatagagcagtgaggaaacactctgtttgtaaagtctgcaagtggatattgagacctctttgaggccttcgttggaaacgggtttttttcatataaggctagacagaagaattcccagtaacttccttgtgttgtgtgtgttcaactcacaggagttgaactttcatttacccagagcagatttgaaacactctttttgtggaatttgcaagtggagatttcaagcgctttgaggccaaaggcagaaaaggaaatatcttcgtttcaaaactagacagaatcattctcagaaactgctgcgtgatgtgtgcgttcaactctcagactttaacttttcttttcattcagcggtttggaaacactctgtttgtaaagtctgcatgtggatattttgaccacttagaggccttcgttggaaacgggtttttttcatgtaaggcaagacagaagaattcccagtaacttccttgtgttgtgtacattcaactcacagagttgaacgtttccttagacacagcagatttgaaacactgtttttgtgcaattggcaagtggtgatttcagccgctttgaggtcaatggtataaaaggaaatatcttcatataaaaactagacagaatgattctcagaaactcctttgtgatgtgtgcgttcaactcacagagtttaacctttcttttcatagagcagttaggaaacactctgtttataaagtctgcaagtggatattcagacccctttgaggccttcgttggaaacgggatttcttcatattatgctagacagaagaattctcaataacttccttgtgttgtgtgtattcaactcacagagttcaacgatcctttacacagagcagacttgaaacactcttgttgtggaatttgcaagtggagatttcagccgctttgaggtcaatggtagaataggaaatatcttcctataaaaactagacagaatgattctcagaaactgctttgtgatgtgtgtgttcaactcacagagtttaacgtttcttttcatagagcagttagtaaacactctgtttataaagtctgcaagtggatattcagacccctttgaggccttcgttggaaacgggatttcttcatattatgctagacagaagaattctcagtaacttccttgtgttgtgtgtattcaactgacagagttaaactttcatttagagagagcagatttgaaacactgtttttgtggaatttgcaagtggagatttcaagcgctttggggccaaaggcagaaaaggaaatatcttcgtataaaaactagacagaatcattctcagaaactgctctgcgatgtgtgcgttcaactctcagagtttaacttttcttttcattcagcagtttggaaacagtctgtttgtaaagtctgcacgtggatattttgaccacttagaggccttcgttggaaacgggtttctttcatgtaaggctagacagaagaattcccagtaacttccttgtgttgtgtgcattcaactcacagagatgaacgttcccttagacagagcagatttgaaacactctatttgtgcaatttgcaagtgtagatttcaagcgctttaaggtcaatggctgaaaaggaaatatcttcgtttcaaaactagacagaatcattcccacagactgcgttgtgatgtgttcgttcaactcacagagtttaacctttcttttcatagagcagttaggaaacactctgttggtaaattctgtaagtggatattctgacatcttgtggcctccgttggaaacgggatctcttcatattctgctagacagaagaattctcagtaacttccttgtgttgtgtgtattcaactcacagagttgaacgatcctttacacagagcggacttgaaacactcgttttgtggaatttgcaagtggagattccagccgcgttgaggtcaatggtagaaaaggaaatatcttcgtataaaaactagacagaatgattctcagaaactcctttgtgatgtgtgggttcaactcacagagtttaacctttcttttcatagagcagttaggaaacactctgtttgtaaagtctgcatgtggatatttggacttctttgaggccttcgttggaaacgggtttttttcatgtaaggctagacagaagaattctcagtaacttccttgtgttgtgtgtattcaactgacagagttcaactttcatttagagagagcagatttgaaacactgtttttgtggaatttgcaagtggagatttcaagcgctttggggccaaaggcagaaaaggaaatatcttcgtataaaaactagacagaatcattctcagaaactgctctgcgatgtgtgcgttcaactctcagagtttaacttttcttttcattcagcagtttggaaacactctgtttgtaaagtctgcacgtggataacttgaccacttagaggccttcgttggaaacgggtttttttcctgtaaggctagacagaagaattcccagtaacttccttgtgttgtgtacattgaactcacagagttgaacgttcccttagacagagcagatttgaaacactctttttgtgcaattggcaagtggagatttcaagcgctttaaggtcaatggcagaaaacgaaatatcttcgtttcaaaactagacagaatcattcccacaaactgcgttgtgatgtgttcgttccactcacagagtttaacctttctgttcatagagcagttaggaaacactctgtttgtaaagtctgtaagtggatattctgacatcttgtggccttcgttggaaacgggatttcttcatattctgctagacagaagaattctcagtaacttccttgtgttgtgtttattcaactcacagagttgaacgatcctttacacagagcagacttgaaacactctttttgtggaatttgcaagtggagatttcagccgctttgaggtcaatggtagaaaaggaaatatcttcgtagaaaaactagacagaatgattctcagaaactcctttgtgatgtgtgcgttcaactcacagagtttaacctttcttttcatagagaagttaggaaacactctgtttgtaaagtctgcaagtggatattcagacctctttgaggccttcgttggaaacgggatttcttcatattctgctagagagaagaattctcagtaacttccttgtgttgtgtgtattcaactgacagagttgaactttcatttagagagagcagatttgaaacactgtttttgtggaatttgcaagtggaaatttcaagcgctttggggtcaaaggcagaaaaggaaatatcttcgtataaaaactagacagaatcattctcagaaactggtgcgtgatgtgtgcgttcaactctcagagtttaacttttcttttcattcagcggtttggaaacactctgtttgtaaagtctgcacgtggaaattttgaccacttagaggccttcgttggaaacgggtttttttcatgtaaggctagacagaagaattctcagtaacttccttgtgttgtgtgtattcaactcacagagttgaacgatcctttacacagagcagacttggaacactctttttgtggaatttgcaagtggagatttcagccgctttgaagtcaaatgtagaaaaggaaatatcttcctataaaaactagacagaatcattcccacaaactgcgttgtgatgtgtgcgttcaactcaaagagtttaacctttcttttcatagagcagttaggaaacactctgtttgtaaattctgcaagtggatattcagacctccttgaggccttcgttggaaacgggatttcttcatattctgctagacagagaattctcagtaacttccttgtgttgtgtgtattcaactcacagagttgaacgatcctttacacagagcagacttgaaacactctttttgtggaatttgcaagtggagatttcagccgctttgaggtcaatggtagaaaaggaaatatcttcgtataaagactagacagaatgattctcagaaactcctttgtgatgtttgcgttcaactcacagagtttaacttttcttttcatagagcagttaggaaacactctgtttgtaaagtctgcaagtggatattcagacctctttgaggccttcgttggaaacgggatttcttcatattatgctagacagaagaattctcagtcacttccttgtgttgtgtgtattcaactgacagagttgaactttcatttagagagagcagatttgaaacactgtttttgtggaatttgcaagtggagatttcaagcgctttggggccaaaggcagaaaaggatatatcttcgtataaaaactagacagaatgattctcagaaactcctttgtgatgtgtgcgttcaactcacagagtttaacctttcttttcatagagcagttaggaaacactctgtaaagtctgcaagtggatattcagacctccttgaggccttctttggaaaccggatttcttcatattctgctatacagaagaattctcagaaacttccttgtgttgtgtgttttcaactcacagagttcaacgatcctttacacagagcagacttgaaacactctttttgtggaatttgcaagtggagaattcagccgctttgaggtcaatggtagaataggaaatatcttcctatagaaactagacagaatgattctcagaaactcctttgtgatgtgtgcgttcaactcacagagtttaacctttcttttcatagagcagttaggaaacactctgtttgttaagtctgcaagtggatattcagacctccttgaggccttcgttggaaacgggatttcttcatattatgctagacagaagaattctcagtaagttccttgtgttgtgtgtattcaactcacagagttgaatgatcctttacacagagcagacttgaaacactctttttgtggaatttgcaagtggagatttcatccgatttgaggtcaatggtagaataggaaatatcttcctatagaaactagacagaatgattctcagaaactcctttgtgatgtgtgtgttcaactcacagagtttaacctttcttttcatagaggagttaggaaacactctgtttgtaaagtctgcaagtggatattcagacctctttgaggccttcgttggaaacgggtttttttcatgtaaggctagacagaagaattcccagtaacttccttgtgttgtgtgtattcaactcacagagttgaactttcatttacacagagcagatttgaaacactctttttgtggaatttgcaaatggagatttcaagccctttcaggccaaaggtagaaaaggaaatatcttcgtataaaaactagacagaatcattctcagaaactgctgcgtgatgtgtgcgttcaactctcagactttaacttttcttttcattcagccgtttggaaacactctgtttgtaaagtctgcacgtggatattttgaccacttagaggccttcgttggaaacgggtttttttcatgtaaggctagacagaagaattcccagtaacttccttgtgttgtgtgcattcaactcacagagttgaacgttcccttagacagagcagatttgaaacactctatttgtgcaatttgcaagtgtagatttcaagcgctttaaggtcaatggcagaaaaggaaatatcttcgtttcaaaactagacagaaatcattcccacaaactgcgttgtgatgtgttcgttcaactcacagagtttaacctttctgttcatagagcagttaggaaacactctgtttgtaaagtctgtaagtggatattctgacatcttgtggccttcgttggaaacgggatttcttcatattctgctagacagaagaattctcagtaacttccttgtgttgtgtttattcaactcacagagttgaatgatcctttacacagagcagacttgaaacactctttttgtggaatttgcaagtggagatttcagccgctttgaggtcaatggtagaaaagtaaatatcttcctataaagactagacagaatgattctcagaaactcctttgtgatgtgtgcgttgaactcacagagtttaacctttcttttcatagagcagttaggaaacactctgtttgtaaagtctgcaagtggatattcagacatctttgaggctttcgttggaaacgggagttcatcatattctgctagacagaagaattctcagtaactgccttgtgttgtgtgtattcaactcacagagttgaacgatcctttacacagagcagacttgaaacactctttttgtggaatatgcaagtggagatttcagccgctttgaggtcaatggtagaataggaaatatcttcctatagaaactagacagaatcattctcagaaactgctgcgtgatgtgtgcgttcaactctcagagtttaacttttcttttcattcagcggtttggaaacactctgtttgtaaagtctgcacgtggaaattttgaccacttagaggccttcgttggaaacgggattttttcatgtaaggctatacagaagaattcccagtaacttccttgtgttgtgtgcattcaactcacagagttgaacgttcccttagacagagcagatttgaaacactatatttgtgtaatttgcaagtgtagatttcaagcgctttaaggtcaacggcagaaaaggaaatatcttcgtttcaaaactagacagaatcattcccacaaactgcgttgtgatgtgttcgttcaactcacagagtttaacctttcttttcatagagcagttaggaaacagtctgtttgtcaattctgtaactggatattctgacatcttgtggccttcgttggaaacgggatttcttcatattctgctagacagaagaattctcagaaacttccttgtgttgtgtgtattcaactcacagagttgaacgatcctttactctgagcaggcttgaaacactccttttgtggaacttgcaattggagatttcagccgctttgaggtcaatggtagaataggaaatatcttcctatagaaactagatagaatgattctcagaaactcctttgtgatgtgtgtgttcaactcacagagtttaacctttcttttcatagagcagttaggaaacactctgtttgtaaagtctgcaagtggatattcagacccctttgaggccttcgttggaaacgggatttcttcatattctgctagacagaagaattctcagtaacttccttgtgttgtgtgtattcaactgacagagttgaactttcatttagagagagcagatttgtaacactgtttttgtggaatttgcaagtggagatttcaagcgctttggggccaaaggcagaaaaggaaatatcttcgtataaaaactagacagaatcattctcagaaactgctgcgtgatgtgtgcgttcaactctcagagtttaacttttcttttcattcagcggtttcgaaacactctgtttgtaaagtctgcacgtggatattttgaccacttagaggccttcgttggaaacgagtttttttcatgtaaggctagacagaagaattcccagtaacttccttgtgttgtgtgcattcaactcacaggagttgaacgttcccttagacagagcagatttgaaacactctatttgtgcaatttgcaagtgtagatttcaagcgctttaaggtcaatggcagaaaaggaaataccttcgtttcaaaactagacagaatcattcccacaaactgcgttgtgatgtgttcgttcaactcacagagtttaacttttcttttcatagagcagttaggaaacactctgtttgtaaagtctgcaagtggatattcagacctccttgaggccttcgttggaaacgggatttcttcatattctgctagacagaagaattctcagtaacttccttgtgttgtgtgcattcaactcacagatttgaacgatcctttacacagagcagacttaaaacacactttttgtggaatttgcaagtggagatttcagccgctttgaggtcaatagtagaaaaggaaatatcttcgtagaaaaactagacagaatgattctcagaaactcctttgtgatgtgtgtgttcaacctcacagagtttaacctttcttttcatagagcagttagtaaacactctgtttataaagtctgcaagtggatattcagacccctttgaggccttcgttggaaacgggatttcttcatattatgctagacagaagaattctcagtaacttccttgtgttgtgtgtattcaacggacagagttgaactttcatttagagagagcagatttgaaacactgtttttgtggaatttgcaagtggagatttcaagcactttggggccaaaggcagaaaaggaaatatcttcgtataaaaactagacagaatcattctcagaaactgctgcgtggtgtgtgcgttcaaatctcagagtttaacttttcttttcattcagcggtttggaaacactctgtttgtaaagtctacacgtggatattttgaccacttagaggccttcgttggaaactggttttcttcatgtaaggctagacagaagaattcccagtaacttccttgtgttgtgtacattcaactcacagagttgaacgttcccttagacagagcagatttgaaacacactttttgtgcaattggcaagtggtgatttcagccgctttgaggtcaatggtagaaaaggaaatatcttcgtataaaaactagacagaatcattcccacaaactgcgttgtgatgtgctcgttcaactcacagagtttaacctttctgttcatagagcagttaggaaacactctgtttgtaaagtctgaaagtggataatctgacatcttgtggccttcgttggaaacgggatttcttcatattctgctagacagaagaattctcagtaacttccttgtgttgtgtgtattcaactcacagagttgaaggatcctttacagagagcaggcttgaaacactctttttgtcgaatttgaaagtggagatttcagccgctttgaggtcaatggtagaataggaaatatcttctaatagaaactagacagaatgattctcagaaactcctttgtgatgtgtgcgttcaactcacagagtttaacctttcttttcatggagcagttaggaaacactctgtttgtaaagtctgcaagtggatattcagacctcctagaggccttctttggaaacaggctttcttcatattatgctagacagaagaattcccagtaacttccttgtgttgtgtgtgttcaactcacagagttgaactttcttttacacagagcagatttgaaacactctttttgtggaatttgcaaatggagatttcaagcgctttgaggccaaaggcagaaaaggaaatatcttcgtataaaaactagacagaatcattctcagaaactgctctgcgatgtgtgcgttcaactctcagagtttaacttttcttttcattcagcagtttggaaacactctgtttgtaaagtctgcacgtggatactttgaccacttagagaccttcgttggaaacgggtttttttcctgtaaggctagacagaagaattcccagtaacttccttgtgttgtgtacattcaactcacagagttgaacgttcccttagacagagcagatttgaaacactctttttgtgcaattggcaaatggagatttcaagcgctttaagttcaatggcagaaaaggaaatatcttcgtttcaaaactagacagaatcatttccacatactgcgatgtgatgtgttcgttcaactcacagaatttaacctttctgttcctagagcagttaggaaacactctgtttgtaaagactgtaagtggatattatgacatcatgtggccttcgttggaaacgggatttcttcatattctgctggacagaagaattctcagtaacttccttgtgttgtgtgtatttaactcacagagttgaatgatcctttacacagagcagacttgaaacactctttttgtggaaattgcaagtggagatttcagccgctttgaggtcaatggtagaaaagtaaatatcttcgtataaagactagacagaatgattctcagaaactcctttgtgatgtgtgcgttcaactcacagagtttaacctttcttttcatagagcagttaggaaacactctgtttgtaaagtctgcaagtggatattcagacctctttgaggccttcgttggaaacgggtttttttcatataaggctacacagaagaattctcagtaacttccttgtgttgtgtgtattcaactgacagagttgaactatcatttagagagagcagatttgaaacactgtttttgtggaatttgcaagtggagatttcaagcgctttggggccaaaggcagaaaaggaaatatcttcgtataaaaactacacagaatcattctcagaaactgctgcgtgatgtgtgcgttcaactctcagagtttaacttttcttttcattcagcggtttggaaacactctgtttgtaaagtctgcacgtggatattttgaccacttagaggccttcgttggaaacggctttttttcatgtaaggctagacagaagaattcccagtaacttccttgtgttgtgtgcattcaactcacagagttgaacgttcccttagacagagcagatttgaaacactctatttgtgcaatttgcaagtgtagttttcaagctctttaaggtcaacggcagaaaaggaaatatcttcgtttcaaaactagacagaatgattctcagaaactcctttgtgatgtgtgcgttcaactcacagagtttaacctttcttttcatagagcagttaggaaacactctgtttgtaaagtctgcatgtggatattcagacctctttgaggccttcgttggaaacggggtttcttcatattatgctagacagaagaattctcagtaacttccttgtgttgtgtgtattcaactcacagagttgaacgatcctttacacagagcagactggaaacactctttttgtggaaattgcaagtggagatttcagccgctttgaggtcaatggtagaaaaggaaatatcttcgtataaaaactagacagaatgattctcagaaactcctttgtgatgtgtgcgttcaaatcacagagtttaacttttcttttcatatagcagttaggaaacactctgtttgtaaagtctgcaagtggatattcagacctctttgaggccttcgttggaaacgggatttcttcatattatgctagacagaagaattgtcagtaacttccttgtgttgtgtgtattcaactgacagagttgaactttcatttcgagagagcagatttgaaacactgtttttgtggaatttgcaagtggagatttcaagcgctttggggccaaaggcagaaaaggaaatatcttcgtataaaaactagacagaatcattctcagaaactgctgtgtgatgtgtgcgttcaactctcagagtttaacttttcttttcattcagcggtttggaaacactctgtttgtaaagtctgcacgtggatattttgaccacttagaggccttcgttggaaacgggtttttttcatgtaaggctagacagaagaattcccagtaacttccttgtgttgtgtgcattcaactcacagagttgaacgttcccttagacagagcagatttgaaacactctatttgtgcaatttgcaagtgtagatttcaagcgctttaaggtcaatggcagaaaaggaaatatcttcgttttaaaactagacagaatcattcccacaaactgcgttgtgatgtgttcgttcaactcacagagtttaacctttcttttcatagagcagttaggaaacagtctgtttgtaaattctgtaagtggatattctgacatcttgtgaccttcgttggaaacgggatttcttcatattctgctagacagaagagttctcagtaacttccttctgttgtgtgtattcaactcacagagttgaacgatcctttacacagagcagacttgaaacactctttttgtggaatttgcaagtggagatttcagccgcttttaggtcaatagtagaaaaggaaatatcttcgtagaaaaactagacagaatgattctcagaaactcctttgtgatgtgtgcgttcaactcacagagttcaacctttcttttcatagagcagttgggaaacactctgtttgtaaagtctgcaagtggatattcagacttctttgaggccttctttggaagcgggatttcttcatattctgctagacagaagaattctcagtaacttccttgtgttgtgtgtattcaactcacagagttgaactttcatttagagagagcagatttgaagcactgtttttgtggaatttgcaagtggagacttcaagcgctttggggccaaaggcagaaaaggaaataccttcgtataaaaactagacagaatcattctcagaaactgctgcgtgatgtgtgcgttcaactctcagagtttaagttttcttttcattcagcggtttggaaacactctgtttgtaaagtctgcacgtggatattttgaccacttagaggccttcgttggaaacgggttttttcatgtaaggctagacagaagaattcccagtaacttccttgtgttgtgtgcattcaactcacagagtggaacgttcccttagacagagcagatttgaaacactctatttgtgcaatttgcaagtgtagatttcaagcgctttaaggtcaacggcagaaaaggaaatatcttcttttcaaaactagacagaatcattcccacaaactgcgttgtgacgtgttcgttcaactcacagagtttaacctttctgttcatagaggagttaggaaacactctgtttgtaaagtctgtaagtggatattctgacatcttgtggccttcgttggaaacgggatttctttatattctgctagacagaagaattctcagtaacttccttgtgttgtgtgtattcaactcacagagttgaacgatcctttacacagagcagacttgtaacactctttttgtggaatttgcatgtggagatttcagccactttgaagtcaaaggtagaaaaggaaataacttcctataaaaactagacagaatgattctcagaaactcctttgtgatgtgtgcattcaactcacagagtttaacttttcttttcatagagcagttgggaaacactctgtttgtaaagtctgcaactggatattcagacctctttgaggccttcgttggaaacgggatttcttcatattctgctagacagaagaattcccagtaacttcattgtgttgtgtgtgttcaactcacagagttgaacttccatttacacagagcagatttgaaacactctttttgtggaatttgcaagtggagatttcaagcgatttgaggccaaaggcagaaaaggaaatatacttcgtttcaaaactagacagaatcattctcagaaactgctctgcgatgtgtgcacgttcaactctcagagtttaacttttcttttcattcagcagtttggaaacactctgtttgtaaagtctgcacgtggatattttgaccacttagaggccttcgttggaaatgggttttttttcctgtaaggctagacagaagaattcccagtaacttccttgtgttgtgtgcattcaactcacagcagttgaacgttcccttagacagagcagatttgaaacactctatttgtgcaatttgcaagtgtagatttcaagcgctttaaggtcaacggcagaaaaggaaatatcttcgtttcaaaactagacagaatcattcccacaaactgcgttgtgatgtgtgcgttcaactcaaagagtttaacctttcttttcatagagcagttaggaaacactctgtttgtaaagtctgcaagtggatattcagacctccttgaggccttcgttggaaacgggatttcttcatattctgctagacaggaataattctcagtaacttccttgtgttgtgtgtattcaactcacagagttgaaagatcctttacagagagcaggcttgaaacactctttttgtcgaatttgcaagtggagatttcagccgctttgaggtcaatggtagaataggaaatatcttcttatagaaactagacagaatgattctcagaaaatcctttgtgatgtgtgcgttcaactcacagagtttaacctttcttttcatagagcagttaggaaacactctgtttgtaaagtctgcaagtagatattcagacattctttgaggccttcgttggaaacgggatttcttcatgttctgctagaaagaagaattctcagtaacttccttgtgttgtgtgtattcaactcacagagttgaacgatcctttacacagagcagacttgaaacactctttttgtggaatttgcaagtggagatttcaaccgctttgaggtcaatggtagaaaagtaaatatcttcgtataaaaactagacagagaatcattctcagtaaactgctgcgtgatgtgtgcgttcaactctcagagtttaacttttcttttcattcagcggtttggaaacactctgtttgtaaagtctgcacgtggatattttgaccacttagaggccttcgttggaaacgggtttttttcatgtaaggctagacagaagaattcccagtaacttccttgtgttgtgtgctttcaactcacagagttgaacgttcccttagacagagcagatttgaaacactctatttgtgcaatttgcaagtgtagatttcaagcgctttaaggtcaatggcagaaaaggaaatatcttcgtttcaaaactagaaagaatcattcccacaaactgcgttgtgatgtgttcgttcaactcacagagtttaacctttctgttcatagagcagttaggaaacactctgtaaagtctgtaagtggatattctgacatcttgtggccttcgttggaaacgggatttcttcatattctgctagacagaataattctcaataacttccttgtgttgtgtgtattcaactcacagagttgaaggatcctttacagagagcaggcttgaaacactctttttgtcgaatttgcaagtggagatttcagccgctttgaggtcaatggtagaataggaaatgtcttcttatagaaactagacaaaatgattctcagaaactcctttgtgatgtgggcgttcaactcacagagtttaacctttcttttcatagagcagttaggaaacactctgtttgtaagtctgcacgtggatatttggacttctttgaggccttcgttggaaacgggtttttttcatgtaaggctagacagaagaattcccagtaacttccttgtgttgtgtgtgttctactcacagagttgaactttgatttacacagagcagatttgaaacactctttttgtggaatttgcaagtggagatttcaagcgctttgaggccaaaggcagaaaaagaaatatcttcgtataaaaactagacagaatcattctcagaaactgctctgcgatgtgtgcgttcaactctcagagtttaacttttcttttcattcagcagtttggaaaaactctgtttgtaaagtctgcacgtggatattttgaccacttagaggccttcgttggaaacgggtttctttcctgtaaggctacacagaagaattcccagtaacttcttgtgttgtgtgcattcaactcacagagttgaacgttcccttagacagagcagatttgaaacactctatttgtgcaatttgcaagtgtagatttcaagcgctttaaggtcaacggcagaaaaggaaatatcttcgtttcaaaactagacagaatcattcccacaaactgcgttgtgatgggttcgttcaactcacagagtttaacctttctgttcatagagcagttaggaaacactctgtttgtaaagtctgtaagtggatattctgacatcttgtggccttcgttggaaacgggatttcttcatattctgctagacagaacaattctcagtaacttccttgtgttgtgtgtattcaactcacagagttgaacgatcctttacacagagcagacttgaaacactctttttgtggaatttgcaagtggagatttcagccgctttgagttcaatggtagaataggaaatatcttcctatagaaactagacagaatgattctcagaaactcctttgtgatgtgtgccttcaactcacagagtttaacctttcttttcatagagcagttaggaaacactctgtttgtaaagtctgcaagtggatattcagacctctttgagaccttcgttggaaacgggatttcttcatattctgctagacagaatcattctcagaaactgctctgcgatgtgtgcgttcaactctcagagtttaacttttcttttcattcagcagtttggaaacactctgtttgtaaagtctgcacgtggatattttgaccacttagaggccttcgttggaaacgggtttttttcctttaaggctagagagaaaaattcccagtaacttccttgtgttgtgtgtattcaactcacagagttgaacgttccctttgacagagcagatttgaaacactctttttctgcaatttggaagtgtagatttgaagcgctttaaggtcaatggcagaaaaggaaatatcttcgtttcaaaactagacagaacgattctcagaaactcctttgtgatgtgtgcgttcaactcacagagtttaacctttcttttcatagagcagttaggaaacactctgtttgtaaagtctgtaagtggatattcagacctgctttgaggccttcgttggaaacgggatttcttcatattatgctagacagaagaattctcagcaacttccttgtgttgtgtgtattcaactcaaggagttgaacgatcctttacacagagcagacttgaaacactctttttgtggaatttgtaagtggagatttcagccgctttgaggttaatggtagaaaatgaaatatattcgtatagaaactagacagaatgattctcagaaactcctttgtgatgtgtgcgttcaactcacagagtttaacctttcttttcatagagcagttaggaaacactctgtttgtaatgtctgcaagtggatattcagacatctttgaggctttcgttggaaacgggatttcttcatattctgctatacagaagaattcccagtaacttccttgtgttgtgtgtgttcaactcaccgagttgaactttcatttacacagagcagatttgaaacactctttttgtggtatttgcaagtggagatttcaagcgctttgaggccaaaggcagaaaaggaaatatcttcgtttcaaaactagacagaatcattctcagaaactgctctgcgatgtgtgcgttcaactctcagagtttaacttttcttttcattcagcagtttggaaacactctgtttgtaaagtctgcacgtggatattttgaccacttagaggccttcgttggaaaagggcttttccctgtaaggctagacagaagaattcccagtaacttccttgtgttgtgtgcattcaactcacagagttgaacgttcccttagacagagcaggtttgaaacactctatttgtgcaatttgcaagtgtagatttcaagcgcattaaggtcaatggcagaaaaggaaatatcttcgtttcaaaactagacagaatcattcccacaaacagcgttgtgatgtgttcgttcaactcacagagtttaacctttcttttcatagagcagttaggaaacagtctgtttgtcaattctgtaagtggatattctgacatcttgtggccttcgttggaaacgggatttcttcatattctgctagacagaagaaatctcagtaacttccttgtgttgtgtgtattcaactcacacagttgaacgatccttttcagagagcagacttgaaacactctttttgtggaatttgcaagtggagatttcagccgctttgaggtcaatggtagaaaaggaaatatcttcgtataaagactagacagaatgattctcagaaactcctttgtgatgtgtgtgttcaactcacagagtttaacctttcttttcatacagcagttaggaaacactctgtttgtaaattctgcaagtggatattttgaccgctttgaggccttcgttggaaacaagtttttttcatgtaaggctagacagaagaattctcagtaactgccttgtgttgtgtgtattcaactcacagagttgaacgatcctttacacagagcagacttgaaacactctttttgtggaatttgcaagtggagatttcagccgctttgaggtcaatggtagaataggaaatatcttcctatagaaactagagagaatcattctcagaaactgctctgcgatgtgtgcgttcaactctcagagttttacttttcttttcattcagcagtttggaaacactctgtttgtaaagtctgcacgtggatattttgaccatttagaggccttcgttggaaacgggtttttttcctgtaaggctagacagaagaattctcagtaacttccttgtgttgtgtgtattcaactcacacagttgaacgatcctttacacagagcagacttgtaacactctttttgtggaatttgcaagtggagatttcagccgctttgaagtcaaatgtagaaaaggaaatatcttcctataaaaactagacatagtgattctcagaaactcctttgtgatgtctgcgttcaactcacagagtttaacctttcttttcatagagcagttaggaaacactctgtttgtaaagtctgcaagtggatatagagacctcctttaggccttcgttggaaatgggatttcttcatattctgctatacagaagaattctcagaaacttcccttgtgttgtgtgtattcaactcacagagttgaacgatcgtttacacagagcagacttgagacactctttttgtggaatttgtaagtggagatttcagccgctttgaggtcaatggtagaaaaggaaatatcttcatataaaaactagacagaatgattctcagaaacttctttgtgatgtgtgcgttcaactcacagagtttaacctttcttttcatagagcagttaggaaacactctgtttgtaaactctgcaagtcgatattcagacctctttgaggccttcgttggaaacgggatttcttcatactatgctagacagaagaattcccagtaacttccttttgttgtgtgtgttcaactcacagagttgaactttcatttacacagagcagatttgaaacactctttttgtgaaatttgcaagtggagatttcaagcgctttgaggccaaaggcagaaaaggaaatatcttcgtttcaaaactagacagaatcattctcagaaactgctgcgtgatgtgtgcgttcaactctcagagtttaacttttcttttcattcagcggtttggaaacactctgtttgtaaagtctgcacgtggaaattttgaccacttagaggccttcattggaaacgggtttttttcatgtaaggctagacagaagaattcccagtaacttccttgtgttgtgtgcattcaactcacagagttgaacgttcccttagacagagcagatttgaaacaatctatttgtgcaatttgcaagtgtagatttcaagcgctttaaggtcaatggcagaaaaggaaatatcttcgtttcaaaactagacagaatgattcccacaaactgcgttgtgatgtgttcgttcaactcacagagtttaacctttctgttcatagagcagttaggaaacactctgtttgtaaagtctgtaagtggatattctgacatcttgtggccttcgttggaaacgggatttcttcatattatgctagacagaagaattctcagtaacttccgcgtgttgtgtgtattcaactcacagagttgaacgatcctttacacagagcagacttgaaacactctttttgtggaatttgccagtggagatttcagccgctttgaggtcaatggtagaaaaggaaatatcttcctgtaaaaactagacagaatgattctcagaaactccttcgtgatgtgtgcgttgaactcacagagtttaacctttcttttcatagagcagttaggaaacactctgtttgtaaagtctgcaagtggatattcagacctctttgaggcgttcgttggaaacgggtttttttcatataaggctagagagaagaattctcagtaacttccatgtgttgtgagtattcaactcacagagttgaacgatcctttacacagagcagacttgtaacaatcattttgtggaatttgcaattggagatttcagccgctttgaagtcaaaggtagaaaaggaaatatcttcgtataaaaactagacagaatcattctcagaaactgctgcgtgatgtgtgcgttcaacttctcagagtttaactttgcttttcattcagcggtttggaaacactctgtttgtaaagtctgcacgtggatattttgaccacttagtggccttcgttggaaacgggtttttttcatgtaaggctagacagaagaattcccagtaacttccttgtgttgtgtgcattcaactcacagagatgaacgttcccttagacagagcagatttgaaacactctatttgtgcaatttgcaagtgtagatttcaagcgctttaaggtcaatggcagaaaaggaaatatcttcgtttcaaaagtagacagaatcattcccacaaactgcgttgtgatgtgttcgttcaactcacagagtttaacctttcttttcatagagcagttaggaaacactctgttggtaaattctgtaagtggatattctgacatcttgtggccttcgttggaaacaggatttcttcatattctgctacacagaagaattctcagaatcttccttgtgttgtgtgtattcaactcacagagttgaacgatcctttacacagagcagacttgaaacactctttttgtggaatttgcaagtggagatttcagccgctttgaggtcaaaggtagaaaatgaagtatcttcgtataaaaactagacagaatgattctcagaaactcctttgtgatgtgtgtgttcaactcacagagtttaacctttcttttcatagagcagttaggaaacactctgtttgtaaagtctgcaagtggatattcagacctctttgaggccttcgttggaaacgggttttttcatataaggctagacaaaaagaattctcagtaacttccttgtgttgtgtgtattcaactgacagagttgaactttcatttagacagagcagatttgaaacactctttttctggaatttgcaagtggagatttcaagcgctttgaggccaaaggcagaaaaggaaatatcttcgtataaaaactacacagaatcattctcagaaactgctctgcgatgtgtgcgttctactctcagagtttaacttttcttttcattcagcagtttggaaacactctgtttgtaaagtctgcacgtggataacttgaccacttagaggccttcattggaaacgggtttttttcatgtaaggctagacagaagaattctcagtaacttccttgtgttgtgtgtattcaactcacagagttgaacgatcctttacacagggcagacttgaaacactctttttgtggaatttgcaagtggagatttcagcctctttgaggttaatggtagaaaatgaaatatcttcctatagaaactagacagattgattctcagaaactcctttgtgatgtgtgcgttcaagtcacagagtttaacctttcttttcatacagcagttaggaaacactctgtttgtaaagtctgcaagtggatattcagacctctttgtggccttcgttggaaacgggatttcttcatattctgctagacagaagaattctcagtaacttccttgtgttgtgtgtattcaactcacagagttgaacgatcctttacacagagcagacttgaaacactctttttgtggaatttgcaagtggagatttcagccgctttgaggtcaatggtagaaaagggaatatcttcgtatagaaactagacagaatgattctcagaaactcctttgtgatgtgtgtgttcaactcacaggagtttaacctttcttttcatagagcagttaggaaacactctgtttgtaaagtctgcaagtggatattcagacctcgttgaggccttcgttggaaacgggatttcttcatattctgctagacagaagaattctcagtaacttccttgtgttgtgtgtattcaaactgacagagttgaactttcatttagagagagcagatttgaaacactgtttttgtggaatttgcaagtggagatttcaagcgctttggggccaaaggcagaaaaggaaatatcttcgtataaaaactagacagaatcattctctgaaactgctctgtgatgtgtgcgttcaactctcagagtttaacttttcttttcattcagcagtttggaaacactctgtttgtaaagtctgcacgtggatattttgaacacttagaggccttcgttggaaacgggtttttttcatgtaaggctagacagaagaattcccagtaacttccttgtgttgtgtgcattcaactcacagagttgaacgttcccttagacagagcagatttgaaacactctatttgtccaatttgcaagtgtagatttcaagcgctttaaggtcaacggcagaaaaggaaatatcttcgtttcaaaactagacagaatcattcccacaaactgcgttgtgatgtgttcgttcaacacacagagtttaacctttcttttcatagagcagttaggaaacagtctgtttgtaaattctgtaagtggatattctgacatcttgtggccttcgttggaaacgggatttcttcatattctgctagacagaagaattctcagtaacttccttgtgttgtgtgtattcaactcacagagttgaacgatcctttacacagagcggacttgaaacactctttttgtggaatttgcaagtggagatttcagccgcgttgaggtcaatggtagaaaaggaaatatcttcgtatagaaactagacagaatgattctcagaaactcttttgtgatgtgtgcgttcaactcacagagttcaacctttcttttcatagagcagttgggaaacactctgtttgtaaagtctgcaagtggatattcagacttctttgaggccttcgttggaagcgggatttcttcatattctgcttgacagaagaattcccagtaacttccttgtgttgtgtgtgttcaactcacagagttgaactttcatttacacagagcagatttgaaacactctttttgtggaatttgcaagtggagatttcaagcagtttgaggccaaaggtagaaaaggaaatatcttcgtttcaaaactagacagaatcattctcagaaactgctctgcgatgtgtgcgttcaactctcagagtttaacttttcttttcattcagcagtttggaaacactttgtttgtaaagtctgcacgtggatattttgaccacttagaggccttcgttggaaacgggtttttttcctgtaaggctagacagaagaattcccagtaacttccttgtgttgtgtacattcaactcacatagttgaacgttcccttagacagagcagatttgaaacactctttttgtgcaattggcaaatggagatttcaagcgctttaaggtcaatggcagaaaaggaaatatcttcgtttcaaaactagacagaatcattcccacaaactgcgttgtgatgtgttcattcaactcacagagtttaacctttctgttcatagagcagttaggaaacactctgtttgtaaagtctgtaagtggatattctgacatcttgtggccttcgttggaaacgggatttcttcatattctgctagacagaagaattctcagaaacttccttgtgttgtgtgttttcaactcacagagttgaacgatcctttacacagagcagacttgcaacactccttttgtggaatttgcaagtggagatttcatccgctttgaggtcaatggtagaataggaaatatcttcctatagaaagtagacagaatgattctcagaaactcctttgtgatgtgtacgttcaactcacagagtttaacttttcttttcatagagcagttaggaaacactctgtttgtaaagtctgcaagtggatattcagacctctttgaggccttcgttggaaacgggtttttttcatataaggctagacagaagaattcccagtaactttccttgtgttgtgtgtgttcaactcacagagttgaactttcatttacacagagcagatttgaagcactctttttgtggaatttgcaagtggagatttcaagcgctttgaggccaaaggcagaaaaggaaatatcttcgtttcaaaactagacagaatcattctcagaaactgctctgtgatgtgtgcgttcaactctcagagtttaacttttcttttcattcagcagtttggaaacactctgtttgtaaagtctgcacgtggatattttgaccacttagaggccttcgttggaaacgggtttttttcatgtaaggctagacaggagaattcccagtaacttccttgtgttgtgtacattcaactcacagagttgaacgttcccttagacagagcagatttgaaacactctttttgggcaattggcaagtggagattacaagcgctttaaggtcaatggcagaaaaggaaatatcttcgtatcaaaactagacagaatcattcccacaaactgcgttgtgatgtgttcgttcaactcacagagtttaacctttctgttcatagagcagttaggaatcactctgtttgtaaactctgcaagtggatattcagacctctttgaggccttcgttggaaacgggatttcttcatattatgctagacagaagaattctcagtaacttccttgtgttgtgtgtattcaactcacagagttgaacgatcctttacacagagcagacttgtaacactctttttgtggaatttgcaagtggagatttcaagcgctttgaggccaaaggcagaaaaggaaatatcttcgtttcaaaactagacagaatgattctcagaaactcctttgtgatgtgtgcgttcaactcacagagttttacctttcttttcatagagcagttaggaaacactctgtttctaaagtctgcaagtgaatattcagacctctttgaggccttcgttggaaacgggttttttcatataaggctagacagaagaattcccagtaacttccttgtgttgtgtgtgttcaactcacagagttctacattcatttacacagagcagatttgaaacactctttttgtggaatttgcaagtggagatttcaagcgctttgaggccaaaggcagaaaaggaaatatcttcgtataaaaactagacagaatcatgctgagaaactgctctgcgatgtgtgcgttcaactctcagaagtttaacttttcttttcattcagcagtttggaaacactctgtttgtaaagtctgcacgtggataacttgaccacttagaggccttcgttggaaacgggtttttttcatgtaaggctagacagaggaattcccagtaacttccttgtgttgtgtacattcaactcacagagttgaacgttcccttagacagagcagatttgaaacactctttttgtgcaattggcaagtggagatttcaagcgctttaaagtcaatggcagaaaaggaaatatcttcgtttcaaaactagacagaatcattcccacaaactgcgttgtgatgtgttcgttcaactcacagagtttaacatttcttttcatagagcagttaggaaacagtctgtttgtcaattctgtaagtggatattctgacatcttgtggccttcgatggaaacgggatttcttcatattctgctagagagaagaattctcagtaacttccttgtgttgtgtgtattcaactcacagagttgaacgatcctttacagagagcagacttgaaacactctttttgtggaattcgcaagtggagatttcagccgctttgaggtcaatgatagaataggaaatatcttcctatagaaactagacagaatgattctcagaaactcctttgtgatgtgtgcgttaaactcacagagtttaacctttctgttcatagagcagttaggaaacactctgtttgtaaagtctgcaagtggatattcagacctccttgaggccttcgttggaaacgggatttcttcctattctgctagacagaagaattctcagtaacttccttgtgttgtgtgtattcaactgacagagttgaactttcatttagagagagcagatttgaaacactgtttttgtggaatttgcaagtggagatttcaagcgctttgcggccaaaggcagaaaaggaaatatcttcgtataaaaactagacagaatcattctcagaaactgctgcgtgatgtgtgcgttcaactctcagactttaacttttcttttcattcagccgtttggaaacactctgtttgtaaagtctgcacgtggatattttgaccacttagaggccttcgttggaaacgggtttttttcctgtaaggctagacagaagaattcccagtaacttccttgtgttgtgtgcattcaactcacagagttgaacgttcccttagacagagcagatttgaaacactctatttgtgcaatttgtagtgtagatttcaagcgctttaaggtcaatggcagaaaaggaaatttcttcgtttcaaaactagacagaatcattcccacaaactgcgttgtgatgttttcgttcaactcacagagtttaacctttctgttcatagagcagttaggaaacactctgtttgtaaagtctgtaagtggatattctgacatcttgtggccttcgttggaaacgggatttcttcatattctgctagacagaagaattctcagtaacttccttgtgttgtgtgtattcaaatcacagagtggaatgatcctttacacagagcagacttgaaacactctttttgtggaatttgcaagtggagatttcagccgctttgaggtcaatggtagaaaaggaaatatctacgtataaagattagacagaatgattctcagaaactcctttgtgatgtgtgcgttcaactcacagagtttaacctttcttttcatagagcagttaggaaacactctgtttataaagtctgcaagtggatattcagacctctttgaggccttcgttggaaacgggatttcttcatattctgctagacagaagaattctcagtaacttccttgtgttgtgtgtattcaactgacagagttgaactttcatttagagagagcagatttgaaacactgtttttgtggaatttgcaagtggagatttcaagcgctttggggccaaaggcagaaaacgaaatatcttcgtatataaactagacagaatcattctcagaaactgctgcgtgatgtgtgcgttcaactctcagagtttaacttttcttttcattcagcggtttggagacactctgtttgtaaagtctgcacgtggatattttgaccacttagaggccttcgttggaaacgggtttttttcatgtaaggctagacagaagaattcccagtaacttccttctgttgcttacattcagctcacagagttgaacgttcccttagacagagcagatttgaaacactctttttgtgcaattggcaagtggagatttcaagcgctttaaggtcagtggcagaaaaggaaatatcttcgtttcaaaactagacagaatcattcccaaaaactgcgttgtgatgtgttcgttcaactcacagagtttaacctttctgttcatagagcagttaggaaacactctgtttgtaaagtctgtaagtggatattctgacatcttgtggccttcgttggaaacgggatttcttcatattctgctagacagaagaattctcagtaacttccttgtgttgtgtgtattcaactcacagagttgaacgattctttacacagagcagacttgaaacactctttttgtgaaatttgcaagtggagatttcagccgctttgagttcaatggtagaataggaaatatcttcctatagaaactagacagaatgattctcagaaactcctttgtgatgtgtgcgttcaactcacagagttcaacctttcttttcatagagcagttgggaaacactctgttcgtaaagtctgcaagtggatattcagacttctttgaggccttcgttggaagcgggatttcttcaaattctgctagacagaagaattcccagtaacttccttctgttgtgtgtgttcaactcacagagttgaactttcatttacacagagcagatttgaaacactctttttgtggaatttgcaagtggagatttcaagcgctttgaggccaaaggcagaaaaggaaatatcttcgtataaaaactagacagaatcattctcagaaaccgctctgtgatgtgtgcgttcaactctcagagtttaacttttcttttcatttagcagtttggaaacactctgtttgtaaagtctgcacgtggatattttgaacacttagaggccttcgttggaaacgggtttttttcatgtaaggctagacagaagaattcccagtaacttccttgtgttgtgtgcattcaactcacagagttgaaccgttcccttagacagagcagatttgaaacactctatttgtgcaatttgcaagtgtagatttcaagcgctttaaggtcaacggcagaaaaggaaatatcttcgtttcaaaactagacagaatcattcccacaaactgcgttgtgatgtgttcgttcaactcacagagtttaacctttctgttcatagagcagttaggaaacactctgtttgtaaagtctgtgagtggatattctgacatcttgtggccttcgttggaaacgggatttcttcatattctgctagacagaagaattctcagtaacttccttgtgttgtgtgtattcaactcacagagttgaacgatcctttacacagagcagacttgaatcactctttttgtggaatttgcaagtggagatttcagccgctttgagttcaatggtagaataggaaatatcttcctatagaaactacacagaatgattctcagaaactcctttgtgatgtgtgcgttcaactcacagagtttaacctttcttttcatagagcagttaggaaacactctgtttggaaagtctgcaagtggatattcagacctctttgaggccttcgttggaaacgggtttttttcatataaggctagacagaagaattctcagtaacttccttgtgttgtgtgtattcaactcacagagttgaacgatcctttacacagagcagacttgtaacactctttttgtggaatttgcaagtggagatttcaagcgctttgaggccaaaggcagaaaaggaaatatcttcgtataaaaactagacagaatcattctcagaaactgctctgcgatgtgtgcgttcaactctcagagtttaacttttcttttcattcagcagtttggaaacactctgtttgtaaagtctgcacgtggatattttgaccacttagaggccttcgttggaaacgggtttttttcatttaaggctagacagaagaattcccagtaacttccttgtgttgtgtgcattcaagtcacagagttgaacgttcccttagacagagcagatttgaaacactctatttgtgcaatctccaagtgtagatttcaagcggtttaaggtcaacggcagaaaaggaaatatcttcgtttcaaaactagacagaatcattctcagaaactcctttgtgatgtgtgcgttcaactcacagagtttaacttttcttttcatagagccgttaggaaacactctgtttgtaaagtctgcaagtggatattcagacctctttgaggccttcgttggaaacgggatttcttcatattatgctagacagaagaattctcagtaacttccttgtgttgtgtgtattcaactcacagagttgaacgatcctttacacagagcagacttgaaacattctttctgtggaatttgcaagtggagatttcagccgctttgaggtcaatggtagaataggaaatattttcctatagaaactagacagaatgattctcagaaacttctttgtgatgtgtgcgttcaactcacagagtttaacttttcttttcatagagcagttaggaaacactctgcttgtaatctctgcaagtggatattcagtcctctttgaggccttcgttggaaacgggatttcatcatactatgctagacagaagaattctcagtaacttccttgtgttgtgtgtattcaactgacagagttgaactttcatttagagagagcagatttgaaacactctttttgtggaatttgcaagtggagatttcaagcgctttggggccaaaggcagaaaaggaaatatcttcgtataaaaactagacagaatcattctcagaaactgctctgcgatgtgtgccttcagcgctcagagtttaacttttcttttcattcagcagtttggaaacactctgtttgtaaagtctgcacgtgtatattttgaccacttagaggccttcgttggaagcgggtttttgtcatgtaaggttagacagaataattcccagtaacttccttgtgttgtgtacattcaacttacagagttgaacgttcccttggacagagcagatttgaaacactctttttgtgcaattggcaagtggagatttcaagcgcttaaggtcaatggcagaaaaggaaatatcttcgtttcaaaactagacagaatgattctcagaaactcctttgtgatgtgtgcgttcaactcacagagtttaacctttcttttcatagagcagttaggaaacactctgtttgcaaagtctgcaagtggatattcagacctctttgaggccttctttggaaacgggatttcttcatattatgctatacacaagaattctcagtaacttccttgtgttgtgtgtattcaactcacagagttgaacgatctcttacacagagcagagttgaaacactctttttctggaatttgcaagtggagatttcagccgctttgaggtcaaaggtagaataggaaatatcttcctatagaaactagacagaatgattctcagaaactcctttgtgatgtgtgcgttcaacacacagagtttaacctttcttttcatagagcagttagggaacactctgtttgtaaagtctgcaagtggatattcagacctctttgaggccgtcgttggaaacgggatttcttcatattatgctagacagaagaattcccagtaacttccttgtgttgtgtgtattcaactcacagagttgaactttcatttacacagagcagatttgaaacactctttttgtggaatttgcaaatggagatttcaagcgctttgaggccaaaggcagaaaaggaaatatcttcgtataaaaactagacagaatcattctcagaaactgctctgcgatgtgtgcgttcaactctccgagtttaacttttcttttcattcagcagtttggaaacactctgtttgtaaagtctgcacgtggataatttgaccacttagaggccttcgttggaaacgggttttttttcatgtaaggctagacagaagaattcccagtaacttccttgtgttgtgtacattcaactcacagagttgaacgttcccttagacagagcagatttgaaacactctttttgtgcaattggcaagtggtgatttcagccgctttgaggtcaatggtagaaaaggaaatatcttcgtataaaaactagacagaatgattctcataaactcctttgtgatgtgtgcgttcaactcacagagtttaacctttctgttcatagagcagttaggaaacactctgtttgtaaagtctgtaagtggatattctgacatcttgtggccttcgttggaaacgggatttcttcatattctgctagacagaagaattctcagaatcttccttgtgttgtgtgtattcaactcacagagttgaacgatcctttacacagagcagacttgaaacactctttttgtggaatttgcaagtggagatttcagccgctttgaggtccatggtagaaaaggaaatatcttcgtctaaaaactagacagaatgattctcataaactcctttgtgatgtgtgcgttcaactcacagagtttaacttttcttttcatagaggagttaggaaacactctgtttgtaaagtctgcaagtggatattcagacctctttgaggccttcgttggaaacgggatttcttcatattctgctagacagaagaattctcagtaacttccttgtgttgtgtgtattcaactcacagagttgaacgatcctttacacagagcagacttgaaacactctttttgtggaatttgcaagtggagatttcagcctctttgaggtcaatagtagaaaaggaaatatcttcgtagaaaaactagacagaatcattctcaaaaactgctgcgtgatgtgtgcgttcaactctcagactttaacttttcttttcattcagccgtttggaaacactctgtttgtaaagtctgcacgtggatattttgaccacttagaggccttcgttggaaacgggtttttttcatgtaaggctagacagaagaattctcagtaacttccttgtgttgtgtgtattcaactcacagagttgaacgatcctttactcagagcaggcttgaaacactccttttgtggaacttgcaattggagatttcagccgctttgaggtcaatggtagaataggaaatatcttcctatagaaactagacagaatgattctcagaaactcctttgtgctgtgtgcgttcagctcacagagtttaacctttcttttcatagagccgttaggaaacactctgtttgtaaagtctgcaagtggatattcagacgtctttgaggccttcgttggaaacgggatttcttcatattctgctagacagaagaattctcagaaacttccttgtgttgtgtgttttcaactcacggagttgaacgatgctttacacagagtagacttgaaacactctttttgtgtaatttgcaagtggagatttcagccgctttgaggtcaatggtagaaaaggaaatatcttcgtataaaaactagacagaatgattctcagaaactcctttgtgatgtgtgtgttcaactcacagagtttaacctatcttttcatagagcagttagtaaacactctgtttataaagtctgcaagtggatattcagacccctttgaggccttcgttggaaacgggatttcttcatattatgctagacagaagaattctcagtaacttccttgtgttgtgtgtattcaactgacagagttgaactttcatttagagagagcagatttgaaacactgtttttgtggaatttgcaaatggagatttcaagcgctttggtgccaaaggcagaaaaggaaatatcttcgtataaaaactagacagaatcattctcagaaactgctctgcgatgtgtgcgttcaactctcagagtttaacttttcttttcattcagcagtttggaaacactctgtttgtaaagtctgcacgtggataatttgacctcttagaggccttcatttgaaacgggtttttttcatgtaaggctagacagaagaattcccagtaacttccttgtgttgtgtgcattcaagtcacagagttgaacgtttccttagacagagcagaattgaaacactctatttgtgcaatttgcaagtgtagatttcaaccgctttaaggtcaacggcagaaaaggaaatatcttcgtttcaaaactagacagaatcattcccacaaactgcgttgtgatgcgtttgttcaactcacagagtttaacctttcttttcatagagcagttaggaaacagtctgtttgtaaattctgtaagtggatattctgacatcttgtggcctcgctggaaacgggattacttcatattctgctagacagaagaattctcagtaacttccttgtgttgtgtgtattcaactctcagagttgaacgatcctttacacagagcagacttgaaacactctttttgtggaatttgcaagtggagatttcagccgctttgaggtcaatagtagaaaaggaaatatcttcgtagaaacactagacagaatgattctcagaaacttctttgtgatgtgtgcgttcaactcacagagtttaacctttcttttcatagggcagttaggaaacactctgtttgtaaactctgcaagtggatattcagacctctttgaggccttcgttggaaacgggatttcttcatactatgctagacagaagaattctcagtaacttccttgtgttgtgcttattcaactgacagagttgaacattcatttagagagagcagatttgaaacactgtttttgtggaatttgcaagtggagatttcaagcgctttggggccaaaggcagaaaacgaaatatcttcgtataaaaactagacagaatcattctcagaaactgctgcgtgatgtgtgcgttcaactctcagagtttaacttttcttttcattcaccggtttggaaacactctgtttgtaaagtctgcacgtggacattttgaccacttagaggtcttctttggaaacgggtttttttcatgtaaggctagacagaagaattcccagtaacttccttgtgttgtgtgcattcaactcacagagatgaacgttcccttagacagagcagatttcaaacactctatttgtgcaatttgcaagtgtagatttcaagcgctttaaggtcaatggcagaaaaggaaatatcttcgtttcaaaactagacagaatcattcccacaaactgcgttgtgaagtgctcgttcaactcacagagtttaacctttctgttcatagagcagttaggaaacactctgtttgtaaagtctgtaagtggatattctgacatcttgtggccttcgttggaaacggaatttcttcatattctgctagacagaagaattctcagtaacttccttgtgttgtgtgtattcaactcacagagttgaacgatcctttacacagagcagacttgaaacactctttttgtggaatttgcaagtggagatttcagccgctttgagttcaatggtagaataggaaatatcttcctgtagaaactagacagaatgattctcagaaactcctttgtgatgtgtgcgttcaactcacagagttcaacctttcttttcatagagcagttgggaaacactctgtttgtaaagtgtgcaagtggatattcagacttctttgaggccttcgttggaagcgggatttcttcatgttctgctagaaagaagaattctcagtaacttccttgtgttgtgtgttttcaactgacagagttgaactttcatttagagagagcagatttgtaacactgtttttgtggaatttgcaagtggagatttcaagcgctttggggccaaaggcagaaaaggaaatatcttcgtataaaaactagacaaaatcattctcagaaactgctctgcgatgtgtgcgctcaactctcagagtttaacttttcttttcattcagcagtttggaaacactctgtttgtaaagtctgcacgtggatattttgaccacttagaggccttcgttggaaacgggtttttttcctgtaaggctagacagaagaattcccaggaacttccttgtgttgtgtacattcaactcacagagttgaacgttcccttagacagagcagatttgaaacactctttttgtgcaattggcaaatggagatttcaagcgctttaagttcaatggcagaaaaggaaatatcttcgtttcaaaactagacagaatcaatcccacaaactgcgttgtgatgtgttcgttcaactcacagagtttaacctttctgttcatagagcagttaggaaacactctgtttgtaaagtctgtaagtggatattctgacattttgtggccttggttggaaatggcatttcttcatatactccaagacagaagaattctcagtaacttccttgtgttgtgtgtattcaactcacagagttgaacgatcctttacacagagcggacttgtaacactctttttgtggaatttgcaagtggagatttcagccgctttgaagtcaaaggtagaaaaggaaatatcttcctataaaaactagacagaatgattctcagaaactcctttgtgatgtgtgcgttcaacacacagagtttaacttttcttttcatagagcagttaggaaacactctgtttgtaaagtctgcaagtggatattcagacctctttgaggccttcgttggaaacggaatttcttcatattatgctagacagaagaattcccagtaacttccttgtgttgtgtgtattcaactcacagagttgaactttcatttacacagagcagatttgaaacactctttttgtggaatttgcaagtggagatttcaagcgctttgaggccaaaggcagaaaaggaaatatcttcgtataaaaactagacagaatcattctcagaaactgctctgcgatgtgtgcgttcaactctcagagtttaacttttcttttcattcagcagtttggaaacaatctgtttgtaaagtctgcacgtggataatttgaccacttagaggccttcgttggaaacgggtttttttcctgtaaggctagacagaagaattcccagtaacttccttgtgttgtgtacattcaactcacagagttgaacgttcccttagacagagcagatttgaaatactctttttgtgcaattggcaagtggagatttcaagcgctttaaggtcaatggcagaaaaggaaatatctgcgtttcaaaactagacagaatcattcccacaaactgcgttgtgatgtgttcgttcaactcacagagtttaacctttcttttcatagagcagttaggaaacactctgtttgtaaattctgtaagtggatattctgacatcttgtggccttcgtttgaaacgggatttcttcatattctgctagacagaagaattctcagtaactttccttgtgttgtgtgtattcaactcacagagttgaacgatcctttacacagagcagacttgtaacactctttttgtggaatttccaagtggagatttcagccgctttgaagtcaaaggtagaaaaggaaatatcttcctataaaaactagacagaatgattctcagaaactcctttgtgatgtgtacgttcaactcacagagtttaacctttcttttcatagagtagttaggaaacactctgtttgtaaagtctgcaagtggatattgagacctctttgaggccttcgttggaaacgggtttttttcatataaggctagacagaagaattcccagtagcttccttgtgttgtgtgtgttcaactcacagagttgaactttcatttacacagagcagatttgaaacactctttttgtggaagttgcaagtggagatttcaagcgctttgaggccaaaggcagaaaaggaaatatcttcgtttcaaaactagacagaatcattctcagaaactgctctgtgatgtgtgcgttcaactctcagagtttaacttttcttttcattcagcagtttggaaactctctgtttgtaaagtctgcacgtgcatattttgaacacttagaggccttcgttggaaacgggtttttttcatgtaaggctagacagaagaattcccagtaacttccttgtgttgtttgcattcaactcacagagttgaacgttcccttagacagagcagatttgaaacactgtatttgtgcaatttgcaagtgtagatttcaagcgctttaaggtcaatggcagaaaaggaaatatcttcgtttcaaaactagacagaatcattcccacaaactgcgttgtgatgtgttcgttcaactcacagagtttaacctttctgttcatagagcagttaggaaacactctgtttgtaaagtctgtaagtggatattctgacatctagtggccttcgttggaaacgggatttcttcatattctgctagacagaagaattctcagtaacttccgcgtgttgtgtgtattcaactcacagagttgaacgatcctttacacagagcagacttgtaacactctttttgtggaatttgcaagtggagatttcagccgctttgaagtcaaaggtagaaaaggaaatatgttcctataaaaactagacagaatgattctcagaaactcctttgtgatgtgtgcgttcaactcacagagtttaacctttcttttcatagagcagttaggaaacactctgtttgtaaagtctgcaagtggatattcagacctcttagaggccttcgttggaaacggttttttttcatataaggctagacagaagaattctcagtaactttccttgtgttgtgtgtattcaactcacagagttgaacgatcctttacacagagcagacttgtaaaactctttttgtggaatttgcaagtggagatttcagccgctttgaagtcaaaggtagaaaaggaaataacttcctataaaaactggacagaaatcattctcagaaactgctctgcgatgtgtgcgttcaactctcagcagtttaacttttcttttcattcagcagtttggaaacactctgtttgtaaagtctgcacgtggataatttgaccacttagaggtcttcgttggaaacgggtttttttcatgtaaggctagacagaagaattcccagtaacttccttgtgttgtgcgcattcaactcacagagttgaacgttcccttagacagagcagatttgaaacactctatttgtgcaatttgcaagtgtagatttcaagcgctttaaggtcaacgccagaaaaggaaatatcttcatttcaaaactagacagaatcattcccacaaactgcgttgtgatgtgttcgttcaactcacagagtttaacttttcttttcatagagcagttaggaaacactctgtttgtaaagtctgtaagtggatattctgacatcttgtggccttcgttggaaacgaggattttcttcatattctgctagacagaagaattctcattaacttccttgtgttgtgtgtattcaactcacagagttgaacgatcctttacacagagcagacttgtaacactctttttgtggaatttgcaagtggagatttcagccgctttgaaatcaaaggtagaaaaggaaatatcttcctataaaaactagacagaatgattctcagaaactcctttgtgatgcgtgcgttcaactcacagagtttaacctttcttttcatagagcagttaggaaacactctgtttgtaaagtctgcaagtggatattcagacctctttgaggccttcgttggaaacgggtttttttcatagaaggctagacagaagaattctcagtaacttccttgtgttgtgtgtattcaactgacagagttgaactttcatttagagagagctgatttgaaacactgtttttgtggaatttgcaagtggagatttcaagcgctttggggccaaaggcagaaaaggaaatatcttcgtataaaaactagacagaatcattctcagaaactgctgcgtgatgtgtgcgttcaactcttagagtttaacttttcttttcattcagcggtttggaaacactctgtttgtaaagtctgcacgtggatattttgaccacttagaggccttcgttggaaacgggttttttgcatgtaaggctagacagaagaattcccagtaacttccttgtgttgtgtgcattcaactcacagagttgaacgttcccttagacagagcagatttgaaacactctatttgtgcaatttgcaagtgtagatctcaagcgctttaaggtcaatggcagaaaaggaaatatcttcgtttcaaaactagacagaatgattctcataaactcctttgtgatgtgtgcgttcaacacacagagtttaacctttctgttcatagagcagttaggaaacactctgtttgtaaagtctgcaagtggatattcagacctccttgaggccttcggtggaaacgggatttcttcatattctgctagacagaataattctcagtaacttccttgtgttgtgtgtattcaactcacagagttgtacgatcctttacagagagcagacttgaaacactctttttgtggaatttgcaagtggagatttcagcagctttgaggtcaacggtagaataggaaatatcttcctatagaaactagacagaatgattctcagaaactcctttgtgatgtgtgcgttcaactcacagagtttaacctttcttttcatagagcagttaggaaacactctgtttgtaaagtctgcaagtggatattcagacctctttgaggccttcgttggaaacgggttttttcatataaggctagacagaagaattcccagtaacttctttgtgttgtgtgtgttcaactcacagagttgaactttcatttacacagagcagatttgaaacactctttttgtggaatttgcaaatggagatttcaagcgctttgaggccaaaggcagaaaaggaaatatcttcgtataaaaactagacagaatcattctcagaaactgctctgcaatgtgtgcgttcaactctcagagtttaacttttcttttcattcagcagtttggaaacactctgtttgtaaagtctgcacgtggataatttgaccacttagaggccttcgttggaaacgggtttttttcatgtaaggctagacagaagaattctcagtaacttccttgtgttgtgtgtattcaactcacagagttgaacgatcctttacacagagcagacttgtaacactctttttgtggaatttgcaagtggagatttcagccgctttgaagtcaaaggtagaaaaggaaatgtcttcctataaaaactagacagaatcattcccacaaactgcattgtgatgtgttcgttcaactcacagagtttaacctttcttttcatagagcagttaggaaacactctgttggtaaattctgtaagtggatattctgacatcttgtggccttcgttggaaacgggatttcttcatattctgctacacagaagaattctcagtaacttccttgtgttgtgtgtgttcaactcacagagttgaacgatcctttacacagagcagacttgaaacactctttttgtggaatttgcaagtggagatttcagccgctttgagttcaatggtagaataggaaatatcttcctatagaaactagacagaatgattctcacaaaatcttttgtgatgtgtgcgttcaactcacagagtttaacttttcttctcatagagcagttaggaaacactctgtttgtaaagtctgcaagtggatattcagacctctttgaggccttcgttggaaacgggatttcttcatattctgctagacagaagaattcccagtaacttccttgtgttgtgtgtgttcaactcacagagttgaactttcatttacacagagcagatttgaaacactctttttgtggaatttgcaaatggagatttcaagcgctttgacgccaaaggcagaaaaggaaatatcttcgtataaaaactagacagaatcattctcagaaactgctctgcgatgtgtgcgttcaactctcagagtttaacttttcttttcattcagcagtttggaaacactctgtttgtaaagtctgcacgtggatattttgaccacttagaggccttcgttggaaacgggtttttttcctgcaaggctagacagaaaaattcccagtaacttcccgtgtgttgtgtgcattcaactcacagagttgaacgttcccttagacagagcagatttgaaaaactccttttgtgcaatttggaattggagatttcaagcgctttaatgtcaatggcagaaaagaaaataccttcgtttcaaaactagacagaatcattcccacaaactgcgttgtgatgtgttcgttcaactcacagagtttaacctttcttttcatagagcagttaggaaacagtctgtttgtcaattctgtaagtggatattctgacatcttgtggtcttcgttggaaacgggatttcttcatattctgctagacagaagaattctcagtaacttccttgtgttgtgtgtattcaactcacagagttgaacgatcctttacactgagcagacttgaaacattctttttgtggaatttgcaagtggagatttcagccgctttgaggtcaatggtagaataggaaatatcttcctatagaaattagacagaatgattctcagaaactcctttgtgatgtgtgtgttcaactcacagagtttaacctttcttttcatagagcagttagtaaacactctgtttataaagtctgcaagtggatattcagacccctttgaggccttcgttggaaacggcatttcttcatattatgctagacagaagaattctcagtaacttccttgtgttgtgtgtattcaagtgacagagttgaactttcatttagagagagcagatttgaaacagtgtttttgtggaatttgcaagtggagatttcaagcgctttggggccaaaggcagaaaaggaaatatcttcgtataaaaactagacagaatcattctcagaaactgctctgcgatgtgtgcgttcaactctcagagtttaacttttcttttcattcagcagtttggaaacactctgtttgtaaagtctgcacgtggatattttgaccatttagaggccttcgttggaaacgggtttttttcttgtaaggctagacagaagaattcccagtaacttccttgtgttgtgtacattcaactcacagggttgaacgttcccttagacagagcagatttgaaacactctttttgtgcaattggcaagtggagatttcaagcgctttaaggtcaatggcagaaaaggaaatatcttcgtttcaaaactagacagaatcattcccacaaactgcgttgtgatgtgttcgttcaactcacagagtttaacctttcttttcatagagcagttaggaaacagtctgtttgaaaattctgtaagtagatattctgacagcttgtggccttcgttggaaacgggatttctttatattctgctagacagaagaattctcagtaacttccttgtgttgtgtgtattcaactcacagagttgaacgatcctttacacagaccagacttgtaacactctttttgtggaatttgcaagtggagatttcagccgctttgaagtcataggtagaaaaggaaatatcttcgtataaaaactagacagaatgattctcagaaactcgtttgtgatgtgtgcgttcaactcacagagtttaacctttcttttcatagagcagttaggaaacactctgtttgtaaagtctgcaagtggatattcagacctctttgaggccttcgttggaaacggggttttttcatataaggctagacagaagaattcccagtaacttccttgtgttgtgtgtgttcaactcacagagttgaactttcagttacacagagcagatttgaaacactctttttgtggaatttgcaagtggagatttcaagcgctttgaggccaaaggcagaaaaggaaatatcttcgtttcaaaactagacagaatgattctcagaatctcctttgtgatgtgtgcgttcaactctcagagtttaacttttcttttcattcagcggtttggaaacactctgtttgttaagtctgcacgtggatattttgaccacttagaggccttcgttggaaacgggtatttttcatgtaaggctagacagaagaattcccagtaacttccttgtgttgtgtgcattcaactcacagagttgaacgttcccttagacagagcagatttgaaacactctatttgtgcaattggcaagtggagatttcaagcgctttaaggtcaatggcagaaaaggaaatatcttcgtttcaaaactagacagaatcattcccacaaactgcgttgtgatgtgttcgttcaactcacagagtttaacatttctgttcatagagcagttaggaaacactctgtttgtaaagtctgtaagtggatattcagacatcttgtggccttcgttggaaacgggatttcttcctattctgctagacagaagaattctcagtaacttccttgtgttgtgtgtattcaactcacagagttgaaggatcctttacagagagcaggcttgaaacactctttttgtcgaatttgcaagtggagatttcagccgctttgaggtcaatggtagaataggaaatatcttcttatagaaactagacagaaatgattctcagaaactcctttgtgatgtgtgtgttcaactcacagagtttaacctttcttttcatagagcagttaggaaacactctgtttgtaaagtctgcaagtggatattcagacctctttgaggccttcgttggaaacgggttgttttcatataaggctagacagaagaattctcagtaacttccttgtgttgtgtgtgttcaattcacagagttgaactttcatttacacagagcagatttgaaacactctttttgtggaatttgcaagtggagatttcacgcgctttgaggccaaaggcagaaaaggaaatatcttcgtttcaaaactagacagaatcattctcagaaactgctctgcgatgtgtgcgttccactctcagagtttaacttttcttttcattcagcagtttggaaacactctgtttgtaaagtctgcacgtggatattttgaccacttagaggccttcgttggaaacgggtttttttcctgtaaggctagacagaagatttcccagtaacttccttgtgttgtgtgcattcaactcacagagttgaacgttccgttagacagagcagatttgaaacactctatttgtgcaatttgcaagtgtagatttcaagcgctttaaggtcaatggcagaaaaggaaatatcttcgtttcaaaactagacagaacgattctcagaaactcctttgtgatgtgtgcgttcaactcacagagtttaacctttcttttcatagagcagttaagaaacactctgtttgtaaagtctgcaagtggatattcagaccactttgaggccttcgttggaaacgggatttcttcatattctgctagacagaagaattctcagtaacttccttgtgttgtgtgaattcaactcacagagttgaacgatcctttacacagagcagacttgaaacactcgttttgtggaacttgcaagtggagatttcagccgctttgtggtcaatagtagaataggaaatatcttcctatagaaactagacagaatgattctcagaaaatcctttgtgatgtgtgcgttcaactcacagagtttaacatttcttttcatagagcagttaggaaacactctctttgtaaagtctgcaagtggatattcagacctctttgaggccttcgttggaaacgggatttcttcatattctgctagacagaagaattctcagtaacttccttgtgttgtgtgtattcaactgacagagttgaactttcatttagagagagcagatttgaaacacggtttttgcggaatttgcaagtggagatttcaagcgctttggggccaaaggcagaaaaggaaatatcttcgtataaaaactagacagaatcattctcagaaactgctctgcgatgtgtgcgttcaactctcagagtttaacttttcttttcattcagcagtttggaaacactctgtttgtaaagtctgcacgtggataacttgaccacttagaggccttcgttggaaacgggtttttttcctgtaaggctagacagaagaattcccagtaacttccttgtgttgtgtacattcaactcacagagttgaacgttcccttagagcagatttgaaacactctttttgtgcaattggcaagtggagatttcaagcgctttaaggtcaatggcagtaaaagaaatatcttcgtttcaaaactagacagaatgattctcataaactcctttgtgatgtgtgcgttcaacacacagagtttaacctttctgttcatagagcagttaggaaacactctgtttgtaaagtctgtaagtggatattctgacatcttgttgccttcgctggaaacgggatttcttcatattctgctagacagaagaattctcagtaacttccttgtgttgtgtgtattcaactcacagagttgaacgatcctttacacagagcatacttgaaacactcttcttgtggaatgtgcaagtggagatttcagccgctttgaggtccatggtagaataggaaatatcttcctatagaaactagacagaatgattctcatgaactcctttgtgatgtgtgcgttcaactcacagagtttaacctttcttttcatagagcagttaggaaacactctgtttgtaaagtctgcaagtggatattcagacctccttgaggccttcgttggaaacgggatttcttcatattctgctagacagaagaattcccagtaacttccttgtgttgtgtgtgttcaactcacagagttgaactttcctttacacagagcagatttgaaacactctttttgtggaatttgcaagtggagatttcaagcgctttgaggccaaaggcagaaaaggaaatatcttcgtataaaaactagacagaatcattctcagaaactgctctgcgatgtgtgcgttcaactctcagagtttaacttttcttttcattcagcagtttggacacactctgtttgtaaagtctgcacgtggataatttgaccacttagaggccttcgttggaaacgggtttttttcatgtaaggctagacagaagaattcccagtaacttccttgtgttgtgtacggttcaactcacagagttgaacgttcccttagacagagcagatttgaaacactctttttgtgcaattggcaagtggagatttcaagcgctttaaggtcaatggcagaaaaggaaatatcttcgtttcaaaactagacagaatcattcccacaaactgcgttgtgatgtgttcgttcaactcacagagtttaacctttctgttcatagagcagttaggaaatactctgtaaagtctgtaagtggatattctgacatcttgtggccttcgttggaaacgggatttcttcatattctgctagacagaagaattctcagtaacttccttgtgttgtgtgtattcaactcacagagctgaacgatcctttacacagagcagacttgaaacactctttttgtggaatttgcaagtggagatttcagccgctttgaggtcaatggtagaaaaggaaatatcttcgtataaagactagacagaatgattctcagaaactcctttgtgatgtgtgcgttcaactcacagagtttaacttttcttttcatagagcagttaggaaacactctgtttgtaatgtctgcaagtggatattcagacctctttgaggccttcgttggaaacgggaattcttcatattatgctagacagaagaattctcagtaacttccttgtgttgtgtttattcaactcacagagttgaatgatcctttacacagagcagtcttgaaacactctttttgtggaatttgcaagtggagatttcagccgctttgaggtcaatggtagaataggaaatatcttcctatagaaaatagacagaatcattctcagaaactgctgcgtgatgtgtgcgttcaactctcagagtttaacttttcttttcattcagcggtttggaaacactctgtttgtaaagtctgcacgtggatattttgaccacttagaggccttcgttggaaacgggttttttttcatgtaaggctagacagaagaattcccagtaacttcccttgtgttgtgtgcattcaactcacagagttgaacgttcccttagacagagcagatttgaaacactctatttgtgcaatttgaaagtgtagatttcaagcgctttaaggtcaacggcagaaaaggaaatatcttcgtttcaaaactagacagaatcactcccacaaactgcgttgtgatgttttcgttcaactcacagagtttaacctttcttttcatagagcagttaggaaacagtctgtttgaaaattctgtaagtggatattctgacatcttgtggccttcgttggaaacgggatttcttcatattctgctagacagaagaattctcagtaacattccttgtgttgtgtgtattcaactcacagagttgaacgatcctttacacagagcagacttgaaacactctttttgtggaatttgcaagtggagatttcagccgctttgaggtcaatggtagaataggaaatatcttcctatagaaactagacaaaatgattctcataaactcctttgtgatgtgtgcgttcaactcacagagtttaacctttcttttcttagagcagttaggaaacactctgtttgtaaagtctgcaagtggatattcagacctctttgaggccttcgttggaaacgggatttcttcatattctgctagacagaagaattctcagtaacttccttgtgttgtgtgtattcaactgacagagttgaactttcatttagagacagcagatttgaaacactgtttttgtggaatttgcaagtggagatttcaagcgctttggggccaaaggcagaaaaggaaatatcttcgtataaaaactagacagaatcattctcagaaactgctgcgtgatgtgtgcgttcaactctcagagtttaacttttcttttcattcagcggtttggaaacactctgtttgtaaagtctacacgtggatattctgaccacttagaggccttcgttggaaacgggttttttgcatgtaaggctagacagaagaattcccagtaacttccttgtgttgtgtgcattcaactcacagagttgaacgttcccttagacagagcagatttgaaacactctatttgtgcaatttgcaagtgtagatttcaagcgctttaaggtcaatggcagaaaaggaaatatcttcgtttcaaaactagacagaatcattcccacaaactgtgttgtgatgtgttcgttcatctcacagagtttaacctttcttttcatagagcagttaggaaacactatgtttgtaaattctgtaagtggatattctgacatcttgtggccttcgttggaaacgggatttcttcatattctgctagacagaagaattctcaagtaacttccttgtgttgtgtgtattcaactcacagagttgaacgatcctttacacagagcagacttgaaacattctttttgtggaattggcaagtggagatttcagccgctttgaggtcaatggtagaataggaaatatcttcctatagaaactagacagaatgattctcagaaactcctttgagatgtgtgctctcaactcacagagtttaacctttcttttcatagagcagttaggaaacactctgtttgtaaagtctgcaagtggatattcagacctctttgaggccttcgttggaaacgggtttttttcatataaggctagacagaagaattctcaagtaacttccttgtgttgtgtgtattcaactgacagagttgaactttcatttagagagagcagatttgaaacactgtttttgtggaatttgcaagtggagatttcaagcgctttggggccaaaggcagaaaaggaaatatcttcgtataaaaactagacagaatcattctcagaaactgctctgcgatgtgtgcgttcaactctcagagtttaacttttcttttcattcagcagtttggaaacactctgtttgtaaagtctgcacgtggatattttgaccacttagaggccttcgttggaaacgggtttctttcctgtaaggctagacagaagaattcccagtaaattccttgtgttgtgtgcattcaactcacagagttgaacgttcccttagacagagcagatttgaaacactctatttgtgcaatttgcaagtgtagatttcaagcgctttaaaggtcaatggcagaaaagggaatatcttcgtttcaaaactagacagaatcattcccacaaactgcgttgtgatgtgttcgttcaactcacagagtttaacctttctgttcatagagcagttaggaaacactctgtttgtaaagtctgcaagtggatattcagacctcttgaaggccttcgttggaaacgggatttcttcatattctgctagacagaagaatacctagtaacttccttgtgttgtgtgcattcaactcacagagttgaacgatcctttacagagagcaggcttgaaacactctttttgtggaatttgcaagtggagatttcagccgctttgaggtcaatggtagaataggaaatatcttcctatagaaactagacagaatgattctcagaaactcctttgtgatgtgtgcgttcaactcacagagtttaacctttcttttcatagagcagttaggaaacaccctgtttgtaaagtctgcaagtggatattcagacatccttgaggctttcgttggaaacgggatttcttcatattatgctagacagaagaattcccagtaactcccttgtgttgtgtgtgttcaactcacagagttgaactttcatttacacagagcagatttgaaacactctttttgtggaatttgcaaatggaggtttcaagcgctttgaggccaaaggcagaaaaggaaatatcttcgtataaaaactagacagaatcattctcagaaactgctctgcgatgtgtgcgttcaactctcagagtttaacttttcttctcattcagaagtttggaaacactctgtttgtaaagtctgcacgtggataacttgaccacttagaggccttcgttggaaacgggtttttttcatgtaaggctagacagaagaattcccagtaacttccttgtgttgtgtgcattcaactcacagagttgaacgttcccttagacagagcagatttgaaacactctatttgtgcaatttgcaagtgtagatttcaagcgcttttaaggtcaacggcagaaaaggaaatatcttcgtttcaaaactagacagaatcattcccacaaactgcgttgtgatgtgttcgttcaactcacggactttaacctttctgttcatagagcagttaagaaacactctgtttgtaaagtctgcaagtggatattcagacctcctagaggccttcattggaaacgggatttcttcatattctgctagacagaagaattctcagtaacttccttgtgttgtgtgtattcaactcacagagttgaacgatcctttacacagagcagacctgtaacactctttttgtggaatttgcaagtggagatttcagccgctttgaagtcaaaggtagaaaaggaaatatcttcctataaaaactagacagaatgattctcagaaactcctttgtgatgtgtgcgttcaactcacagagttcaacctttcttttcatagagcagttgggaaacactctgtttgtaaactctgcaagtggatattcagacttctttgaggccttcgttggaagcgggatttcttcatattctgctagacagaagaattctcagtaactttccttgtgttgtgtgtattcaactcacagagttgaacgatcctttacacagagcagacttgaaacactctttttgtggaatttgcaagtggagatttcaagcgctttggggccaaaggcagaaaaggaaatatcttcgtataaaaactagacagaatcattctcagaaactgctctgcgatgtgtgcgttcaactctcagagtttaacgtttcttttcattcagcagtttggaaacactctgtttgtaaagtctgcacgtggatattttgaccacttagaggccttcgttggaaacgggtttttttcctgtaaggctagacagaagaattcccagtaacttccttgtgttgtgtacattcaactcacagagttgaacgttcccttagacagagcagatttgaaacacactttttgtgcaattggcaagtggagatttcaagcgctttaaggtcaatggcataaaaggaaatatcttcgtttcaaaactagacagaatcattcccacaaactgcgttgtgatgtgttcgttcaactcacagagtttaacctttcttttcatagagcagttaggaaacagtctgtttgtcaattctgtaagtggatattctgacatcttgtgaccttcgttggaaacgggatttcttcatattctgctagacagaagaattctcagtaacttccttgtgttgtgtgtattcaactcacagagttgaacgatcctttacacagagcagacttgaaacactctttttgtggaatttgcaagtggagatttcagccgctttgaggtcaatagtagaaaagtaaatatcttcgtagaaaaactagacagaatgattctcagaaactcctttgtgatgtgtgcgttcaactcacagagtttaacctttctgttcatagagcagttaggaaacactctgtttgtaaagtctgcaagtggatattcagacctctttgaggccttcgttggaaacgggaattcttcatattctgctagacagaagaattctctgtaacttccttgtgttgtgtgtattcaactgacagagttgaactttcatttagagagagcagatttgaaacactgtttttgtggaatttgcaagtggagatttcaagcgctttggggccaaaggcagaaaaggaaataacttcgtataaaaacttgacagaatgattctcagaaactcctttgtgatgtgtgtgttcaactcacagagtttaacctttcttttcatagagcagttaggaaacactctgtttgtaaggtctgcaagaggatattcagacctctttgaggccttcgttggaaacgggtttttttcatataaggctagacagaagaattcccagtaacttccttgtgttgtgtgtgttcaactcacagcagttgaactttcatttacacagagcagatttgaaacactctttttgtggaatttgcaaatggagatttcaagcgctttgaggccaaaggcagaaaaggaaatatcttcgtttcaaaactagacagaatcattctcagaaactgctctgcgatgtgtgcgttcaactctcagagtttaacttttcttgtcattcagcagtttggaaacactctttttgtaaagtctgcacgtggatattttgaccacttagaggccttcgttggaaacgggtttttttcatgtaaggctagacagaagaattctcagtaacttccttgtgttgtgtgtattcaactcacagagttgaacgatcctttacacagagcagacttgaaacactctttttgtggaatttgcaactggagatttcagccgctttgaggtcaaaggtagaaaaggaaactatcttcgtagaaaaattagacagaatgattctcagaaacttctttgtgatgtgtgcgttcaactcacagagtttaacctttcttttcatagagcagttaggaaacactctgtttgtaaagtctgcaagtggatattcagacctctttgaggccttcgttggaaacgggatttcttcatactatgctagacacaagaattcccagtaacttccttgtgttgtgtgtgttcaactcacagagttgaactttcatttacacagagcagatttgaaacactctttttgtggaaattgcaaatggagatttcaagcgctttgaggccaaaggcagaaaaggaaatatcttcgtataaaaactagacagaatcattctctgaaactgctctgcgatgtgtgccttcagcgctcagagtttaacttttcttttcattcagcagtttggaaacactctgtttctaaagtctgcacgtggatattttgaccacttagaggccttcgttggaaacgggtttttgtcatgtaaggctagacagaagaattcccagtaactcccttgtgttgtgtacattcaactcacagagttgaacgttcccttagacagagcagatttgaaacactctttttgtgcaattggcaagtggagatttcaagcgcttaaggtcaatggcagaaaaggaaatatttccgtttcaaaactagacagaaatgattctcagaaactcctttgtgatgtgtgtgttcaactcacagagtttaacctttcttttcatagagcagttaggaaacactctgtttgtaaagtctgcaagtggatattcagacctccttgaggccttcgttggaaacgggatttcttcatattctgctagacagaagaattctcagtaacttccttgtgttgtgtgtattcaactcacagagttgaacgatcctttacacagagcagacttggaacactctttttgtggaattttcaagtggagatttcagccgcgttgaggtcaatggtagaaaaggaaatatcttcgtataaaaactagacagaacgattctcagaaactcctttgtgatgtgtgcgttcaactcacagactttaacctttcttttcatagagcagttaggaaacactctgtttgtaaagtctgcaagtggatattcagacctctttgaggccttcgttggaaacgggatttcttcatattctgctagacagaagaattcctcagtaactttcttgtgttgtgtgtattcaactgacagagttgaactttcatttagagagaccagatttgaaacactgtttttgtggaatttgcaagtggagatttcaagcgctttggggccaaaggcagaaaaggaaatatcttcgtataaaaactagacagaatcattctcagaaactgctgcgtgatgtgtgcgttcaactctcagagtttaacttttcttttcattcagcggtttggaaacactctgtttgtaaagtctgtacgtggatattttgaccacttagaggccttcgttgcaaacgggttttttgcatgtaaggctagacagaagaattcccagtaacttccttgtgttgtgtgcattcaactcacagagttgaacgttcccttagacagagcagatttgaaacactctatttgtgcaatttgcaagtgtagatttcaagcgctttaaggtcaatggcagaaaaggaaatttcttcgttttaaaactagacagaatcattcccacaaactgcgttgtgatgtgttcgttcaactcacagagtttaacctttcttttcatagagaagttaggaaacactctgtttgtaaagtctgcaagtggatattcagacctccttgaggccttcgttggaaacgggatttcttcatattctgctagacagaagaattctcagaatcttccttgtgttgtgtgtattcaactcacagagttgaacgatggtttacacagagcagatttgaaacactcatttggtggaatttgcaagtggagatttcagccgcattgaggtcaatggtagaaaaggaaatatcttcgtataacaactagacagaatgattctcataaactcctttgtgatgtgtgcgttcaactcacagagtttaacctttcttttcatagagcagttaggaaacactctgtttgaaaagtctgcaagtggatattcagaccaccttgaggccttcgttggaaacgggatttcttcatattctgctagacagaagaattctctgtaacttccttgtgttgtgtgtattcaactgacagagttgaactttcatttagagagagcaggtttgaaacactgtttttgtggaatttgcaagtggagatttcaagcgctttggggcaaaaggcagaaaaggaaatatcttcgtataaaaactagacagaatcattctcagaaactgcgctgcgatgtgtgcgttgaactctcagagtttaacttttcttttcattcagcagtttggaaacactctgtttgtaaagtctgcacgtggatattttgaccacttagagtccttcgttggaaacgggtttttttcctgtaaggctagacagaagaattcccaggaacttccttgtgttgtgtacattcaactcacagagttgaacgttcccttagacagagcagatttgaaacactctttttgtgcaattggcaagtggtgatttcagccgctttgaggtcaatggtaaaaaaggaaataacttcctataaaaactagacagaatcattaccacaaactgcgttgtgatgtgttcgttcaactcacagagtttaacctttctgttcatagagcagttaggaaacactctgtttgtaaagtctgtaagtggatattctgacatcttgtggccttcgttggaaacgggatttcttcatattctgctagacagaagaattctcagtaacttccttgtgttgtgtgtattcaactcacagagttgaacgatcctttacacagagcagacttcaaacactctttttgtggaatttgcaagtggagatttcagccgctttgaggtcaatggtagaataggaaatatcttcctatagaaactagacagaatgattctgagaaactcctttgtgatgtgtgcattcaactcacagagtttaacctttcttttcatagagcagttaggaaacactctgtttgtaaagtctgcaagtggatattcagacctccttgaggccttcgttggaaacgggatttcttcatattatgctagacagaagaattttcagtaacttccttgtgttgtgtgtattcaactcacagagttgaacgatcctttacacagagcagacttgaaacactctttttgtggaatttgcaagtggagatttcagccgctttgagttcaatggtagaataggaaatatcttcctatagaaactagacagaatcattctcagaaactgctctgcgatgtgtgcgttcaactctcagagtttaacttttcttttcattcagcagtttggaaacactctgttttttaaagtctgcacgtggatattttgaccacttagaggccttcgttggaaacgggtttttttcctgtaaggctagacagaagaattcccaataacttccttgtgttgtgtacattcaactcacagagttgaacgttcccttagacagagcagatttgaaacactctttttgtgcaattggcaagtggagatttcaagcgctttaaggtcaatggcagaaaaggaaatatcttcgtttcaaaactagacagaatgattctcagaaactcctttgtgatgtgtgcactcaactcacagagtttagcctttcttttcatagagcagttaggaaacactctgtttgtaaagtctgcaagtggatattcagacctctttgaggccttcgtaggaaatgggatttcttcatattatgctagacagaagaattctcagtaacttccttgtgttgtgtgtattcaactcacagagttgaacgatcctttacacagagcagacttgaaacactctttttctggaatttgcaagtggagatttcagcctctttgaggtcaatggtagaaaaggaaatatcttcgtataaaaactagacagaatgattctcagaaactcctttgtgatgtgtgcgtgcaactcacagagtttaacctttcttttcatagagcagttaggaaacactctgtttgtaaagtctgcaagtggatattcagacatctttgaggctttcgttggaaacgggattttttcatattctgctaggcagaagaattctcagtaacttccttgtgttgtgtgtattcaactgacagagttgaactttcatttggagagagcagatttgaaacactgtttttgtggaatttgcaagtggagatttcaagcgctttggggccaaaggcagaaaaggaaatatcttcgtataaaaactagaaagaatcattctcagaaactgctctgcgatgtgtgcgttcaactctcagagtttaacttttcttttcattcagcagtttggaaacactctgtttggaaagtctgcacgtggatattttgaccacttagaggccttcgttggaaacgggtttttttcctgtaaggctagacagaagaattcccagtaacttccttgtgttgtgtgtgttcaactcacagagttgaactttcatttacacagagcagatttgaaacactctttttgtgcaattggcaagtggagatttcaagcgctttaaggtcaatggcagaaaaggaaatatcttcgtttcaaaactagacagaatgattctcagaaacttctttgtgatgtgtgcgttcaactcacagagtttaacctttcttttcatagaggagttaggaaacactctgtttgtaaagtctgcaagtggatattcagacctctttgaggccatcgttggaaacgggatttcttcatactatgctagacagaagaattctcagtaacttccttgtgttgtgtgtattcaactcacagagttgaacgatcctttacacagagcagacttgtaacactctttttgtggaatttgcaagtggagatttcagccgcgttgaggtcaatggtagaaaaggaaatatcttcgtataaaaactagacagaatgattctcagaaactcctttgtgatgtgtgcgttcaactcacagagtttaacctttcttttcatagagcagttaggaaacactccgtttctaaagtctgcaagtggatattcagacctctttgaggccttcgttggaaacgggtttttttcatataaggctagagagaagaattcccagtaacttccttgtgttgtgtgtgttcaactcacagagttgaactttcatttacacagagcagatttgaaatactctttttgtggaatttgcaagtggagatttcaagcgctttgaggccaaaggccgaaaaggaaatatcttcgtataaaaactagacagaatgattctcagaaatttctttgtgatgtgtgcgttcaactcacagagtttaacttttcttttcattcagcagtttggaaacactctgtttgtaaagtctgcaagtggatattcagacctctttgaggccttccttggaaacgggttttttttcatgtaaggctagacagaagaattcccagtaacttccttgtgttgtgtacattcaactcacagagttgaacgttcccttagacaaagcagatttgaaacactctttttgtgcaattggcaagtggagatttcaagcgctttaaggtcaatggcagaaaaggaaatatcttcgtttcaaaactagacagaatgattctcagaacctcctttgtgatgtgtgcgttcaactcacagagttgaacctttcttttcatagagcagttaggaaacactctgtttgtaaagtctgcaagtggatattcagacatccttgaggctttcgttggaaacgggatttcttcatattctgctagaaagaagaattctcagtaacttctttgtgttgtgtttattcaactcacagagttgaacgatactttacacagagcagacttgatacactcgttttgtggaatttgcaagtggagatttcagccgctttgaggtccatggtagaaaaggaaatatcttcgtataaaaacttgacagaatgattctcagaaactcctttgtgatgtgtgcgttcaactcacagagtttaacctttcttttcatagagcagttaggaaacactctgtttgtaaagtctgcaagtggatattcggacctccttgaggccttctttggaaacgggatttcttcttattatgctagacagaagaattctcagtaacttccttgtgttgtgtgtattcaactcacagagttgaactttcatttagagagagcagatttgaaacacagtttttgtggaatttgcaagtggagatttcaagcgctttggggccaaaggcagaaaaggaaatatcttcgtataaaaactagacagaatcatactcagaaactgctgcgtgatgtgtgcgttgaactctcagagtttaacttttcttttcattcagcggtttggaaacactctgtttgtaaagtctgcacgtggatattttgaccacttagaggccttcgttggaaacgggtttttttcatgtaaggctagacagaagaattcccagtaacttccttgtgttgtgtacattcaactcacagagttgaacgttcccttagacagagcagatttgaaatactctttttgtgcaattggcaagtggagatttcaagcgctttaaggtcaatggcagaaaaggaaatatcttcgtttcaaaactagacagaatcattcccaaaaactgcgttgtgatgtgttcgttcatctcacagagtttaacctttcttttcatagagcagttaggaaacactctgtttgtaaattctgtaagtggatattctgacatcttgtggccttcgttggaaacgggatttcttcatattctgctagacagaaaaattctcagtaacttccttgtgttgtgtgtattcaactcacagagttgaacgatcctttacacagagcagacttgaaacactctttttgtggaatttgcaagtggagatttcagccgctttgaggtcaatggtagaaaaggaaatatcttcctatagaaactggacagaaagattctcagaaactcctttgtgatgtgtgcgttcaactcacagagtttaacctttcttttcatagagcagttaggaaacactctgtttgtaaagtctgcaagttcatattcagacctctttgaggccttcgttggaaacgggtttttttcatataaggctagagagaagaattcccagtaacttccttgtgttgtgtgtgttcaactcacagagttgaactttcatttacacagagcagatttgaaacactctttttgtggaatttgcaaatggagatttcagccgcgttgaggtcaacggtagaaaaggatatatcttcgtttcaaaactagacagaatcattctcagaaactgctctgcgatgtgtgcgttgaactctcagagtttaacttttcttttcattcagcagtttggaaacactctgtttgtaaagtctgcacgtggatattttgaccacttagaggcctttgttggaaacgggtttttttcctggaaggctagacagaagaattcccagtaactttccttgtgttgtgtgcattcaactcacagagttgaacgttcccttagacagagcagatttgaaacactctatttgtgcaattggcaagtgtagatttcaagcgctttaaggtcaatggcagaaaaggaaatatcttcgtttcaaaactagacagaatgattctcagaaactcctttgtgatgtgtgccttcaactcacagagtttaacttttcttttcatagagcagttaggaaacactctgtttctaaagtctgcaagtggatattcagacctctttgaggccttcgttggaaacgggatttcttcatattctgctagacagaagaattctcagtaacttccgtgtgttgcgtgtattcaactcacagagttgaacgatcctttacacagagcagacttgaaacactctttttgtggaatttgcaagtggagatttcagccgctttgaggtcaaagttagaaaggaaatatcttcctataaaaactagacagaatgattctcagaaactcctttgtgatgtgtgcgttcaactcacagagttcaacctttcttttaatagagcagttgggaaacactctgtttgtaaagtctgcaagtggatattcagacttctttgaggccttcgttggaagcgggctttcttcatattctgctagacagaagaattcccagtaacttccatgtgttgtgtgtgttcaactcacagagttgaacgttcccttagacagagcagatttgaaacactctttttgtggaatttgcaagtggagatttcaagcgctttgaggccaaaggcagaaaaggaaatatcttcgtataaaaactagacagaatcattctcagaaactgctgcgtgatgtgtgcgttcaagtctcagagtttaacttttcttttcattcagcggtttggaaacactctgtttgtaaagactgcacgtggatattttgaccacttagaggccttcgttggaaacgggttttttttcatgtaaggctagacagaagaattcccaggaacttccttgtgttgtgtacattcaactcacagagttgaacgttcccttagacagagcagatttgaaacactctttttgtgcaattggcaagtggtgatttcagccgctttgacgtcaatggtagaaaaggaaatatcttcgtataaaaactagacagaatcattcccacaaactgcgttgtgatgtgttcgttcaactcacagagtttaacctttcttttcatagagcacttaggaaacagtctgtttgtaaattctgtaagtggatattctgacatcttgtggccttcgttggaaacgggatttcttcatattctgctagacagaataattctcagtaagttccttgttttgtgtgtattcaactcacagagttgaaggatcctttagagagagcaggcttgaaacactctttttgtcgaaattgcaagtggagatttcagccgctttgaggtcaatggtagaataggaaatatcttcctatagaaactagacagaatgattctcagaaactcctttgtgatgtgtgtgttcaactcacagagtttaacctttcttttcatagagcagttaggaaacactctgtttgtaaagtctgcaagtggatattcagacctctttgaggccttctttggaaacgggatttttcatataaggctagacagaagaattcccagtaacttccttgtgttgtgtgtgttcaactcacagagttgaactttcatttacacagagcagatttgaaacactctttttgtggaatttgcaggtggagatttcaagcgctttgaggccaaaggcagaaaaggaaatatacttcgtataaaaactagacagaatcattctcagaaactgctctgcgatgtgtgcgttcaactctcagagtttaacttttcttttcattcagcagtttggaaacactctgtttgtaaagtctgcacgtggataatttgaccacttagaggccttcgttggaaacgggtttttttcatgtaaggatagacagaagaattcccagtaacttcccttgtgttgtgtgcattcaactcacagagttgaacgttcccttagacagagcagatttgaaacactctatttgtgcaatttgcaagtgtagatttcaagcgctttaaggtcaatggtagaaaaggaaatatcttcgttttaaaactagacagaatcactcccacaaactgcgttgtgatgtgttcgttcaactcacagagtttaacctttcttttcatagagcagttaggaaacagtctgtttgaaaattctgtaagtggatattctgacatcttgtggccttcgttggaaacgggatttcttcatattctgctagacagaagaattctcagaatcttccttgtgttgtgtgtattcaactcacagagttgaacgatcctttacacagagcagatttgaaacactctttttgtggaatttgcaagtggagatttcagccgctttgaggtcaatggtagaaaaggaaatatcttcctataaaaactagacagaatgattctcagaaactcgtttgtgatgtgtgcgttcaactcacagagattaacttttcttttcatagagcagttaggaaacactctgtttgtaaagtctgcaagtggatattcagacctctttgtggccttcgttggaaacgggatttcttcatattatgctagacagaagaattctcagtaacttccttgtgttgtgtgtattcaactgacagagttgaactttcatttagagagagcagatttgaaacactgtttttgtggaatttgcaagtggagatttcaagcgctttggggccaaaggcagaaaaggaaatatcttcgtataaaaagtagacagaatcattctcagaaactgctgcgtgatgtgtgcgttcaactctcagagtttaacttttcttttcattcagcagtttggaaacactctgtttgtaaagtctgcacgtggaaattttgaccacttagaggccttcgttggaaacgggtttttttcatgtaaggctagacagaagaattcccagtaacttccttgtgttatgtgcattcaactcacagagttgaacgttcccttagacagagcagatttgaaacactctatttgtgcaatttgcaagtgtagatttcaagcgctttaaggtcaatggcagaaaaggaaatatcttcgtttcaaaactagacagaatcattcccacaaactgcgttgtgatgtgttcgttcaactcacagagtttaacctttcttttcatagagcagttaggaaacagtctgtttgtaaattctgtaagtggatattctgatatcttgtggccttcgttggaaacgggatttcttcatattctgctagacagaagaattctcagtaacttctttgtgttgtgtgtattcaactcacagagttgagcgatcctttacacagagcagacttgaaacactcgttttgtggaatttgcaagtggagatttcagccgctttgaggtcaatggtagaaaaggaaatatcttcgtataaaaactagacagaatgattctcagaaactcctttgtgatgtgtgcgttcaactcacagagtttaacctttcttttcatagagcagttaagaaacactctgtttgtaaagtctgcaagtggatattcagacctctttgaggccttcgttggaaacgggatttcttcatattctgctagacagaagaattcccagtaacttcccttgtgttgtgtgtgttcaactcacagagttgaactttcatttacacagagcagatttgaaacactctttttgtggaatttgcaagtggagatttcaagcgctttcaggccaaaggcagaaaaggaaatatcttcgtataaaaactaggcagaatcattctcagaaactgctctgcgatgtgtgcgttcaactctcagagtttaacttttcttttcattcagcagtttggaaacacactgtttgtaaagtctgcacgtggatattttgaccacttagaggccttcgttggaaacgggtttttttcctgtaaggctagacagaagaattcccagtaacttccttgtgttgtgtacattcaactcacagagttgaacgttcccttagacagagcagatttgaaacactctttttgtgcaattggcaagtggagatttcaagcgctttgaggtcaatggcagaaaaggaaatatcttcgtttcaaaactagacagaatgattctcagaaactcctttgtgatgtgtgcgttcaactcacagagtttaagttttcttttcatagagcagttaggaaacactctgtttgtaaagtctgcaggtggatattcagacctctttgaggccttcgttggaaaagggatttcttcatattatgctagacagaataattctcagtaacttccttgtgttgtgtgtattcaactcagagttgtacgatcctttacagagagcagacttgaaacactctttttgtggaatttgcaagtggagatttcagccgctttgaggtcaatggtagaactaggaaatatcttcctatagaaactagacagaatgattctcagaaactcctttgtgatgtgtgtgttcaactcacagagtttaacctttcttttcatagagcagttagtaaacactctgtttataaagtctgcaagtggatattcagagccctttgtggccttcgttggaaacggggtttcttcatattatgctagacagaagaattcccagtaacttccttgtgttgtgtgtgttcaactcacagagttgaactttcatttacacagagcagatttgaaacactctttttgtggaatttgcaagtggagatttcaagcgctttaaggccaaaggcagaaaaggaaatatcttcgtttcaaaactagacagaatcattctcagaaactgctgcgtgatgtgtgcgttcaactctcagagtttaacttttcttttcattcagcggtttggaaacactctgtttgtaaagtctgcaagtggatattcagacctctttgaggccttcgttggaaacgggatttcttcatattatgctagacagaagaattcccagtaacttccttgtgttgtgtacattcaactcacagagttgaacgttcccttagacagagcagatttgaaacactttttttgtgcaattggcaagtggtgatttcaaccgctttgaggtcaatggtagaaaaggaaatatcttcgtataaaaactagacagaatcattcccacaaactgcgttgtgatgtgttcgttcaactcacagagtttaacctttctgttcatagagcagttaggaaacactctgtttgtaaagtctgcaagtggatattcagacctccttgaggctttcgttggaaacgggatttgttcatattctgctagacagaagaattctcagtaacttccttgtgttgtgtgtattcaactcacagagttgaacgatcctttacacagagcagacttgaaacactctttttctggaatttgcaagtggagatttcagccgctttgaggtcaatggtagaaaaggaaatatcttcgtataaaaactagacagaatgattctcagaaactcctttgtgatgtgtgcgttcaactcacagagtttaacctttcttttcatagagcagttaggaaacactctgtttgtaaagtctgcaagtggatattcagacctctttgaggccttcgttagaaacgggatttcttcatattatgctagacagaagaattctcagtaacttccttgtgttgtgtgtattcaactgacagtgttgaactttcatttagagagagcagatttgaaacactgtttttgtggaatttgcaagtggagatttcaagcgctttggggccaaaggcagaaaaggaaatatcttcgtataaaaactagacagaatcattctcagaaactgctgcgtgatgtgtgcgttcaactctcagagtttaacttttcttttcattcagcggtttggaaacactctgttcgtaaagtctgcacgtggatattttgaccacttagaggccttcgttggaaacgggtttttttcatgttaggctagacagaagaattcccagtaacttccttgtgttgtgtacattcaactcacagaggtgaacgttcccttagacagagcagatttgaaacactctttttgtgcaattggcaagtggagatttcaagcgctttaaggtcaatggcagaaaaggaaatatcttcgtttcaaaactagacagaatgattctcagaaactcctttgtgatgtgtgcattcaactcacagagtttaacctttcttttcatagagcagttaggaaacactctgtttgtaaagtctgcaagtggatattcagacctccttgaggccttcgttggaaacgggatttcttcatattctgctatacagaagaattctcagaaacttccttgtgttgtgtgtattcaactcacagagttgaacgatcgtttacacagagcagacttgagacactctttttgtggaatttgtaagtggagatttcagccgctttgaggtcaatggtagaaagggaaatatcttcatataaaaactagacagaatgattctcagaacctcctttgtgatgtgtgcgttcaactcacagagtttaacctttcttttcatagagcagttaggaaacactctgtttgtaaagtctgcaagtggatattcagacctctttgaggccttcgttggaaacgggatttcttcatattatgctagacagaagaattctcagtaacttccttgtgttgtgtgtattcaactcacagagttgaactttcatttacacagagcagatttgaaacactctttttgtggaatttgcaagtggagatttcaagcgctttgaggccaaaggcagaaaaggaaatatcttcgtttcaaaactagacagaatcattctcagaaactgctctgcgatgtgtgcgttcaactctcagagtttaacttttcttttcattcagcagtttggaaacactctgtttgtaaagtctgcacgtggataacttgaccacttagaggccttcgttggaaacgggtttttttcctgtaaggctagacagaagaattcccaggaacttccttgtgttgtgtacattcaactcacagagttgaacgttcccttagacagagcagatttgaaacactctttttgtgcaattggcaagtggtgatttcagccgctttgaggtcaatggtagaaaaggaaatatcttcgtttcaaaaccagacagaatgattctcagaaactcctttgtgatgtgtgcgttcaactcacagagtttaacctttcttttcatagagcagttaggaaacactctatttgtaaagtctgcaagtggatattcagacatccttgagtctttctttggaaacgggatttcttcatattctgctagaaagaataattctcagtaacttccttgtgttgtgtgtattcaactcacagagttgaacgatcctttacacagagcagacttgaaacactctttttgtggaatttgcaattggagatttcagccgctttgaggtcaatggtagaataggaaatatcttcctatagaaactagacagaatgattctcagaaactcctttctgatgtgtgtgttcaactcacagagtttaaactttcttttcatagagcagttaggaaacactctgtttataaagtctgcaagtggatattcagacccctttgtggccttcgttggaaacgggatttcttcatattatgctagacagaagaattctcagtaacttccttgtgttgtgtgtattgaactcgcagagttgaacgatcctttacacagagcagacttgaaacactctttttgtggaatttgcaagtggagatttcagccgcattgaggtcaatagtagaaaaggaaatatcttcgtagaaaaactagacagaatcattctcagaaactgctctgcgatgtgtgcgttcaactctcagagtttaacttttcttttcattcagcagtttggaaacactctgtttgtaaagtctgcacgtggatattttgaccacttagaggccttcgttggaaacgggtttttttcctgtaaggctacacagaggaattcccagtaacttccttgtgttgtgtacattcaactcacagagttgaacgttcccttagacagagcagatttgaaacactctttttgtgcaattggcaaatggagatttcaagcgctttaagttcaatggcagaaaaggaaatatcttcgtttcaaaactagacagaatcattcccacaaactgcgttgtgatgtgttcgttcaaatcacagagtttaacctttctgttcatagagcagttaggaaacactctgtttgtaaagtctgtaagtggatattctgacatcttgtggccttcgttggaaacgggatttcttcatattctgctagacagaagaattctcagtaacttccttgtgttgtgtgtattcaactcacagagttgaacgatcctttacacagagcagacttgaaacactctttttgtggaatttgcaagtggagatttcagccgctttgaggtcaatggtagaataggaaatatcttcctatagaaaatagacagaatgattctcagaaactcttttatgatgtgtgcgttcaactcacagagtttaacttttcttttcatagagcagttaggaaacactctgtttgtaaactctgcaagtggatattcagacctctttgaggccttcgttgcaaacgggatttgttcatattatgcctgacagaagaattctcagtaacttccttgtgttgtgtgtattcaactcacagagttgaactttcattcacacagagcagatttgaaacacgctttttatggaatttgcaagtggagatttcaagcgctttgaggccaaaggcagaaaaggaaatatcttcgtttcaaaactagacagaatcattctcagaaactgctctgcgatgtgtgcgttcaactatcagagtttaacttttcttttcattcagcagtttggaaacactctgtttgtaaagcctgcacgtggataatttgaccacatagaggccttcgttggaaacgggtttttttcatgtaaggctagacagaagaattcccagtaacttccttgtgttgtgtgcattcaactcacagagttgaacgttcccttagacagagcagatttgaaacactctatttgtgcaatttgcaagtgtagatttcaagcgctttaaggtcaatggcagaaaaggaaatatcttcgtttcaaaactagacagaatgattctcagaaactcctttgtgatgtgtgcgttcaactcacagagttcaacctttcttttcctagagcagttgggaaacactctgtttgtaaagtctgcatgtggatattcagacatccttgaggctttcgttggaaacgggatttcttcatattctgctagaaagaagaattctcagtaacttccttgtgttgtgtgtattcaactcacagagttgaacgatcctttacagagagcagacttgacacactctttttgtggaatttgcaagtggagatttcagccgctttgtggtcaatggtagaataggaaatatcttcctatagaaactagacagaatgattctcagaaactcctttgtgatgtgtgcgttcaactcacagagtttaacctttcttttcatagagcagttaggaaactctctgtttgtaaagtctgcaagtggatattcagacatccttgaggctttcgttggaaacgggatttcttcatattctgctagaaagaagaattcccagtaacttccttgtgttgtgtgtgttcaactcacagagttgaactttcatttacacagagcagatttgaaacactctttttgtggaatttgcaagtggagatttcaagcgctttgaggccaaaggcagaaaagtaaatatcttcgtttcaaaactagacagaatcattctcagaaactgctgcgtgatgtgtgcgttcaactctcagagtttaacttttcatttcattcagcggtttggaaacactctgtttgtaaagtctgcacgtggaaattttgaccacttagaggccttcgttggaaacgggtttttttcatgtaaggctagacagaagaattcccagtaacttcccttgtgttgtgtacattcaactcacagagttgaacgttcccttagacagagcagatttgaaacactctttttgtgcaattggcaaatggagatttcaagcgctttaaggtcaatggcaggaaaggaaatatcttcgtttcaaaactagacagaatcattcccacaaactgcgttgtgatgtgttcgttcaactcacagagtttaacctttctgttcatagagcagttaggaaacactctctttgtaaagtctgtaagtggatattctgatatcttgtggccttcgttggaaacgggatttcttcatattatgctagacagaagaattctcagtaacttccttgtgttttgtgtattcaactcacagagttgaacgatcctttacacagagcagactagaaacattctttttgtggaatttgcaagtggagatttcagccgctttgaggtcaatcgtagaataggaaatatcttcctatagaaactagacagaacgattctcagaaactcctttgtgatgtgagcgttcaactcacagagtttaacctttcttttcttagagcagttaggaaacactctgtttgtaaagtctgcaagtggatattcagacctctttgaggccttcgttggaaacgggatttcttcatattctgctagacagaagaattctcagtaacttcccttgtgttgtgtgtattcaactgacagagttgaactttcatttagagagagcagatttgaaacactgtttttgtggaatttgcaagtggagatttcatgcgctttggggccaaaggcagaaaaggaaatatcttcgtataaaaactagacagaatcattctcagaaactgctctgcgatgtgtgcgttcaactctcagagtttaacttttcttttcattcagcagtttggaaacactctgtttgtaaagtctgcacgtggataacttgaccacttagaggccttcgttggaaacgggttttttttcctgtaaggctagacagaagaattcccaggaacttccttatgttgtgtacattcaactcagagagttgaacgttcccttagacagagcagatttgaaacactctttttgtgcaattggcaagtggtgatttcagccggtttgaggtcaatggtagaaaaggaaatatcttcgtataaaaactagacagaatcattcccacaaactgcgctgtgatgtgttcgttcaactcacagagtttaacctttcttttcatagagcagttaggaaacagtctgtttgtaaattctgtaagtggatattctgacatcttgtggccttcgttggaaacgggatttcttcatatgctgctagacagaagaattctcagtaacttccttttgttgtgtgtattcaactcacagagttgaacgatcctttacacagagcagacttgaaacactctttttgtggaatttgcaagtggagatttcagccgctttgaggtcaatcgtagaaaaggaaatatcttcgtagaaaaactagacagaatgattctcagaaactcctttgggatgtgtgcgttcaactcacagagtttaacctttcttttcatagagcagttaggaaacactctgtttgtaaagtctgcaagtggatattcagacctctttgaggccttcgttggaaacgggatttcttcatactgtgctagacagaagaattctcagtaacttccttgtgttgtgtgtattcaactcacagagttgaacgatcctttacacagagcggacttgaaacacactttttgtggaatttgcaagtggagatttcagccgcgttgaggtcaatggtagaaaagcaaatatcttcgtataaaaaatagacagaatcattctcagaaactgctctgcgatgtgtgcgttcaactctcagagtttaactttgcttttcattcagcagtttggaaacactctgtttgtaaactctgcacgtggataatttgaccacttagaggccttcgttggaaacgggtttttttcatgtaaggctagacagaagaattcccagtaacttccttgtgttgtgtacattcaactcacagagttgaacgttccctcagacagagcagatttgaaacactctttttgtgcaattggcaaatggagatttcaagcgctttaaggtcaatggcagaaaaggaaatatcttcgtttcaaaactagacagaatcattcccacaaactgcgttgtgatgtgttcgttcaactcacagagtttaacctttctgttcatagagcagttaggaaacagtctgtttgtcaattctgtaagtggatattctgacatcttgtggccttcgttggaaacgggatttcttcatattctgctagacagaagaattctcagaaacttcgttgtgttgtgtgttttcaactcacagagttcaacgatcctttacacagagtagacttgaaacactctttttgtggaattggcagggtggagatttcagccgctttgaggtcaatggtagaaaaggaaatatcttcgtataaaaactagacagaacgattctcagaaactccattgtgatgtgtgcgttcaactcacagagtttaacctttcttttcatagagcagttaggaaacactctgtttgtaaagtctgcaagtggatattcagacctccttgaggccttcgttggaaacgggatttcttcatattctgctagacagaagaattcccagtaacttccttgtgttgtgtgtgttcaactcacagtgttgaactttcatttacacagagcagatttgaaacactctttttgtggaatttgcaagtggagatttcaagcgctttgaggccaaaggcagaaaaggaaatatcttcgtttcaaaactagacagaatcattctcagaaactgctctgcgatgtgtgcgttcaactctcagagtttaacttttcttttcattcagcagtttggaaacactctgtttgtaaagtctgcacgtggatattttgaccacttagaggccttcgttggaaacgggtttttttcctgtaaggatagacagaagaattcccagtaacttccttgtgttgtgtgcattcaactcacagagttgaacgttcccttagacagagcagatttgaaacactctatttgttcaatttgcaagtgtagatttcaagcgctttaaggtcaatgacagaaaaggaaatatcttcgtttcaaaactagacagaatcattcccacaaactgcgttgtgatgtgttcgttcaactcacagagtttaacctttctgttcatagagcagttaggaaacactctgtttgtaaagtctgcaagtggatattcagacctccttgaggccttcgttggaaaagggatttcttcatattctgctagacagaagaattctcagaaacttccttgtgttgtgtgttttcaactcacagagttgaacgatcctttacacagagcagacttgaaacactccttttgtggaatttgcaagtggagatttcagccgctttgaggtcagtggtagattaggaaatatcttcctatagaaactagacagaatgattctcagaaactcctttgtgatgtgagcgttcaactcacagagtttaacctttcttttcatagagcagttaggaaacactctgtttgtaaagtctgcaagtggatattcagacatccttgaggctttcgttggaaacgggatttcttcatattctgctagaaagaagaattctcagtaacttccttgtgttgtgtgtattcaactgacagagttgagctttcatttggagagagcagatttgaaacactgtttttgtggaatttgcaagtggagatttcaagcgctttggggccaaaggcagaaaaggaaatatcttcgtataaaaactagacagaatcattctcagaaactgctctgcgatgtgtgcgttcaactctcagagtttaacttttcttttcattcagcagtttggaaacactctgtttgtaaagtctgcacgtggatattttgaccacttagaggccttcgttggaaacgggtttctttcctgtaaggctagacagaagaattcccagtaacttccttgtgttgtgtacattcaactcacagagttgaacgttcccttagacagagcagatttgaaacactctttttgtgcaattggcaagtggagatttcaagcgctttgaggccaaaggcagaaaaggaaatatcttcgtataaaaactagacagaatcattcccacaaactgcgttgtgatgtgttcgttcaactcacagagtttaacctttccgttcatagagcagttaggaaacactctgtttgtaaagtctgtaagtggatattctgacatcttgtggccttcgttggaaacgggatttcttcatattatgctagacagaagaattctcagtaacttccttgtgttgtgtgtattcaactcacagagttgaacgattctttacacagagcagacttgaaacactctttttgtggaatttgcaagtggagatttcagccactttgaggtcaatagtagaaaaggaaatatcttcgtagaaaaactagacagaatgattctcagaaactcctttgtgatgtgtgcgttcaactcacagagtttaacctttcttttcatagagcagttaggaaacactctgtttgtaaagtctgcaagtggatattcagtcctccttgaggccttcgttggaaacgggtttttttcatataagtctagacagaagaattctcagtaatttccttgtgttgtgtgtattcaactgacagagttgaactttcatttagagagagcagatttgaaacactgtttttgtggtatttgcaagtggagatttcaagcgctttggggccaaaggcagaaaaggaaatatcttcgtataaaaactagacagaatcattctcagaaactgctctgcgatgtgtgcgttcaactctcagagtttaacttttcttttcattcagcagtttggaaacactctgtttgtaaagtctgcacgtgcataatttgaccacttagaggccttcgttggaaacgggtttttttcatgtaaggctagacagaagaattctcagtaacttccttgtgttgtgtgtattcaactcacagagttgaacgatcctttacacagagcagacttgaaacactctttttgtggaatttgcaggtggagatttcagccgctttgaggtcaatggtagaataggaaatatcttcctatagaaactagacagaatgattctcagaaactcctttgtgatgtgtgcgttcaactcacagagtttaaccttccaattcatagagcagttaggaaacactctgtttgtaaagtctgcaagtggatattcagacctctttgaggccttctttggaaacgggatttcttcattttctgctagacagaagaattctcagtaacttctttgtgttgtgtgtattcaactcacagagttgaacgatcctttacacagagcagacttgaaacactctttttgtggaatttcaagtggagatttcagccgctttgaggtcaatggtagaataggaaatatcttcctatagaaactagacagaatgattctcagaaaatcttttgtgatgtgtgctttcaactcacagagtttaacttttcttctcatagagcagttaggaaacactctgtttgtaaagtctgcaagtggatattcagacctgtttgaggccttcgttggaaacgggatttcttcatattatgctagacagaagaattctcagtaacttccttgtgttgtgtgtattcagctgacagagttgaactttcatttagagagagcagatttgaaacactgtttttgtggaatttgcaattggagatttcaagcgctttggggccaaaggcagaaaaggaaatatcttcgtataaaaactagacagaatcattctcagaaactgctgcgtgatgtgtgcgttcaactctcagagtttaacttttcttttcattcagcggtttggagacactctgtttgtaaagtctgcaagtggatattttgaccacttagaggccttcgttggaaacgggtttttttcatgtaaggctagacagaagagttctcagtaacttccttgtgttgtgtgtattcaactcacacagttgaacgatcctttacagagagcggacttgtaacactctttttgtggaatttgcaagtggagatttcagccgctttgaagtcaaaggtagaaaagggaatatcttcctataaaaactagacagaatcattcccagaaactgcgttgcgatgtgttcgttcaactcacagagtttaacctttcttttcatagagcacttaggaaacagtctgtttgtaaattctgtaagtggatattctgacatcttgtggccttcgttggaaacgggatttcttcatattctgctagacagaagaattctcagtaacttccttgtgttgtgtgtatgcatctcacagagttgaacgatcctttacacagagcagacttgaaacactctttttgtggaatttgcaagtggagatttcagccgctttgaggtcaatggtagaaaaggaaatatcttcctataaaaactagacagaatgattctcagaaactcctttgtgatgtgtgtgttcaactcgcagagtttaacctttcttttcatagagcagttagtaaacactctgtttataaagtctgcaagtggatattcagacccctttgaggccttcgttggaaacgggatttcttcatattatgctagacagaagaattctcagaatcttccttgtgttgtgtgtattcaactcacagagttgaacgatggtttacacagagcagatttgaaacacactttttgtggaatttgcaagtggagatttcaagcgctttgaggccaaaggcagaaaaggaaatatcttcgtataaaaactagacagaatcactctcagaaactgctctgcgatgtgtgcgttcaactctcagagtttaacttttcttttcattcagcagtttggaaacactctgtttgtaaagtctgcacgtggatattttgaccaatcagaggccttcgttggaaacgggtttttttcctgtaaggctagacagaagaattctcagtaacttccttgtgttgtgtgtattcaactgacagagttgaactttcatttagagagaggagatttgaaacactgtttttgtggaatttgcaagtggagatttcaagcgctttaaggtcaatggcagaaaaggaaatatcttcgtttcaaaactagacagaatcattcccacaaactgcgttgtgatgtgttccttcaactcacagagtttaagctttctgttcatagagcagttaggaaacactctgtttgtaaagtctgtaagtggatattctgacatcttgtggccttcgttggaaacgggatttcttcatattatgctagacagaagaattctcagtaacttccttgtgttgtgtgtattcaactcacagagttgaacgatcctttacacagagcagacttgtaacactctttttgtggaatttgcaagtggagatttcaggggctttgaagtcaaaggtacaaaaggaaatatcttcctataaaaactagacagaatgattctcagaaactcctttgtgatgtgtgcgttcaactcacagagtttaacctttcttttcatagagcagttaggaaacactctgtttgtaaagtctgcaagtggatattcagacctctttgaggccttcgttggaaacgggttttttacatataacgctaaacagaagaattcccagtaacttccttgtgttgtgtgtgttcaactcacagagttgaactttcatttacacagagcagatttgaaacactctttttgtggaatttgcaagtttagatttcaagcgctttgaggccaaaggcagaaaaggaaatatcttcgtataaaaactagacagaatcattctcagaaactgctctgcgatgtgtgcgttcaactctcagagttcaacttttcttttcattcagcagtttggaaacactctgtttgtaaagtctgcacgtggataatttgactacttagaggccttcgttggaaacgggtttttttcatgtaaggctacacagaagaattcccagtaacttccttgtgttgtgtacattcaactcacagagttgaacgttcccttagacagagcagatttgaaacactctttttgtgcaattggcaaatggagatttcaagcgctttaagttcaatggcagaaaaggaaatatcttcgtttcaaaactagacagaatcattcccacaaactgcgttgtgatgtgttcgttcaactcacagagtttaacctttcttttcatagagcagttaggaaacagtctgtcaattctgtaagtggatattctgacctctagtggccttcgttggaaacgggatttcttcatattctgctagacagaagaattctcagaatcttccttgtgttgtgtgtattcaactcacagagttgaacgatcctttacacagagcagacttgaaacactctttttgtggaatttgcaagtggagatttcagccgctttgaggtcaatggtagaaaaggaaatattttcgtataaaaactagacagaatgattctcataaactcctttgtgatgtgtgcgttcaactcacagagtttaacctttcttttcatagagcagttaggaaacactctgtttgtaaagtctgcaagtcgatattcagacctctttgaggccttcgttggaaacgggatttcttcatattctgctagacagaagaattctcagtaacttccttgtgttgtgtgtattcaactgacagagttgaactttcatttagagagagcagatttgaaacactgtttttgtggaatttgcaagtggagatttcatgcgctttcgggccaaaggcagaaaaggaaatatcttcgtataaaaactagacagaatcattctcagaaactgctctgcgatgtgtgcgttcaactctcagagtttaacttttcttttcattcagcagtttggaaacactctgtttgtaaagtctgcacgtggatattttgaccacttagaggccttcgttggaaacggtttttttcatgtaaggctagacagaagaattcccagtaacttccttgtgttgtgtgcattcaactcacagagttgaacgttcccttagacagagcagatttgaaacactctatttgtgcaatttgcaagtgtagatttcaagcgctttaaggtcaacggcagaaaaggaaataccttcgtttcaaaagtagacagaatcattcccacaaactgcgttgtgatgtgttcgttcaactcacagagtttaacctttcttttcatagagcagttaggaaacagtctgtttgtaaattctgtaagtggatattctgacatcttgtggccttcgttggaaacgggattttatcatattctgctagacagaagattctcagtaacttccttgtgttgtgtgtattcaactcacagagttgaacgatcctttacacagagcggacttgaaacaaactttttgtggaatttgcaagtggagatttcagccgcgttgaggtcaatggtagaaaaggaaatatcttcgtataaaaactagacagaatgattctcagaaactcctttgtgatgtgtgcgttcaactcacagagtttaacctttcttttcatagagcagttaggaaacactctgcttgtaaagtctgcaagtggatattcagccctctttgaggccatcgttggaaacgggtttttttcatataaggctagacagaagaattctcagtaacttccttgtgttgtgtgtattcaagtgacagagttgaactttcatttagagagagcagatttgaaacactgtttttgtggaatttgcaagtggagatttcaagcgctttggggccaaaggcagaaaaggaaatatcttcgtataaaaactagacagaatcattctcagaaactgctctgcgatgtgtgcgttcaactctcagagtttaacttttcattcagcagtttggaaacactctgtttgtaaagtctgcgcgtggataacttgaccatttagaggccttcgttggaaacgggtttttttcatgtaaggctagacagaagaattcccagtaacttccttgtgttgtgtgcattcaactcacagagttgaacgttcccttggacagagcagatttgaaacactctatttgtgcaatttgcaagtgtagatttcaagcgctttatggtcaatggcagaaaaggaaatatcttcgtttcaaaactagacagaatcattcccacaaactgcgttgtgatgtgttcgttcaactcacagagtttaacctttctgttcatagagcagttaggaaacgctctgtttgtaaagtctgtaagtggatattctgacatcttgtggccttcgttggaaacgggatttcttcatattctgctagacagaagaattctcagtaacttccttgtgttgtgtgtattcaactcacagagttgaacgatgctttacacagagcatacttgaaacactcttcttgtggaatttgcaagtggagatttcagccgctttgaggtcaatggtagaataggaaatatcttcctatagaaactagacagaatgattctcagaaacttctttgtgatgtgtgcgttcaactcacagagtttaacctttcttttcatagagcagttaggaaacactctgtttgtaaactctgcaagtggatattcagacctctttgaggccttcgttggaaacgggatttcttcatactatgctacacagaagaattcccagtaacttccttgtgttgtgtgtgttcaactcgcagagttgaactttcatttacacagagcagatttgaaacactctttttgtggaatttgcaaatggagatttcaagcgctttgaggccaaaggcagaaaaggaaatatcttcgtataaaaaccagacagaatcattctcagaaactactgcgtgatgtgtgcgttcaactctcagagtttaacttttcttttcattcagcggtttggaaacactttgtttgtaaagtctgcacgtggatattttgaccacctagaggccttcgttggaaacgggtttttttcatgtaaggctagacagaagaattcccagtaacttccttgtgttgtgtacattcaactcacagagttcaacgttcccttagacagagcagatttgaaacactctttttgtgcaattggcaagtggagatttcaagcgctttaaggtcaatggcagaaaaggaaatatcttcgtttcaaaactagacagaatcattcccacaaactgcgttgtgatgtgttcgttcaactcacagagtttaacctttcttttcatagagcagttaggaaacactctgttggtaaattctgtaagtggatattctgacatcttgtggccttcgttggaaacaggatttcttcatattctgctacacagaagaattctcagaaacttccttgtgttgtgtgtattcaactctcagagttgaacgaccctttacacagagcagacttgaaacactctttttgtggaatttgcaagtggagatttcagccgctttgaggtcaatggtagaaaaggaaatatcttcgtataaaaactagacagaatgattctcagaaactcctttgtgatgtgtgtgttcaactctgagagtttaacctttcttttcatagagcagttaggaaacactctgtttatagagtctgcaagtggatattcagacccctttgtggtcttctttggaaacggatttcttcatattatgctagacagaagaattctcagtaacttccttgtgttgtgtgtattcaactgacagagttgaactttcatttagagggagcagattagaaacactgtttttgtggaatttgcaagtgcagatttcaagcgctttgtggccaaaggcagaaaaggaaatatcttcgtatgaaaactagacagaatcattctcagaaactgctctgtgatgtgtgcgttcaactctcagagtttaacttttcttttcattcagcagtttggaaacactctgtttgtaaagtctgcacgtggataatttgaccacttagaggccttcgttggaaacgggtttttttcatgtaaggctagacagaagaattcccagtaacttccttgtgttgtgtgcattcaactcagagagttgaactttcctttagacagagcagatttgaaacactctatttgtgcaatttgcaagtgtagatttcaagcgctttaaggtcaatggcagaaaaggaaatatcttcgtttcaaaactagacagaatcattcccacaaactgcgttgtgatgtgttcgttcaactcacagagtttaacttttctgttcatagagcagttaggaaacactctgtttgtaaagtctacaagtggatattcagacctccttgaggccttcgttggaaacgggatttcttcatattctgctagaccgaagaattctcagaatcttccttgtgttgtgtgtattcaactcacacagttgaacgatggtttacacagagcagatttgaaacactctttttgtggaatttgcaagtggagatttcagccgcgttgaggtcaatggtagaaaaggaaatatcttcgtataaaaactagacagcatgattctcagaaactcctttgtgatgtgtgcgttcaattcacagagtttaacttttcttttcatagagcagttaggaaacactctgtttgtaaagtctgaaagtggatattcagacctctttgtggccttcgttggaaacgggatttcttcatattctgctagacagaagaattctcagtaacttccttgtgttgtgtgtattcaactcacagagttgaacgatcctttacacagagcagacttgaaacactctttttgtggaatttgcaagtggagatttcaagcgcttcggggccaaaggcagaaaaggaaatatcttcgtataaaaactagacagaatcattctcagaaactgctgcgtgatgtgtgcgttcaactctcagagtttaacttttcttttcattcagcggtttggaaacactctgtttgtaaagtctgcacgtggaaattttgaccacttagaggccttcgttggaaacgggattttttcatgtaaggctagacagaataattcccggtaacttccttgtgttgtgtacattcaacttacagagttgaacgttcccttggacagagcagatttgaaacactctttttgtgcaattggcaagtggagatttcaagcgcttaaggtcaatggcagaaaaggaaatatcttcgtttcaaaactagacagaatcattcccacaaactgcgttgtgatgtgttcgttcaactcacagagtttaacctttctgttcatagagcagttaggaaacactctgtttgtaaagtctgtaagtggatattctgatatcttgtggccttcgttggaaacgggatttcttcatattctgctagacagaagaattctcagaaacttccttgtgttgtgtgtattcaactcacagagttgaacgatcgtttacacagagcagacttgagaccctctttttgtggaatttgtaagtggagatttcagccgctttgaggtcaatggtagaaaaggaaatatcttcatataaaaactagacagaatgattctcagaaactcctttgtgatgtgtgtgttcaactcacagagtttaacctttcctttcatagagcagttagtaaacactctgtttataaagtctgcaagtggatattcagacccctttgaggccttcgttggaaacgggatttcttcatattatgctagacagaagaattcccagtaacttctttgtgttgtgtgtgttcaactcacagagttgaactttgatttacacagagcagatttgaaacactctttttgtggaatttgcaagtggagatttcaagcgctttgaggccaaaggcagaaaaggaaatatcttcgtataaaaactagacagaatcattctcagcaatctgctgcgtgatgtgtgcgttcaactctcagagtttaacttttcttttcattcagcggtttggaaacactctgtttgtaaagtctgcacgtggatattttgaccacttagaggccttcgttggaaacgggtttttttcatgtaaggctagacagaagaattcccagtaacttccttgtgttgtgtacattcaactcacagagttgaacgttcccttagacagagcagatttgaaacactctttttgtgcaattggcaagtggagatttcaagcgctttaaggtcaatggcagaaaaggaaatatcttcgtttcaaaactagacagaatcattcccacaaactgcgttgtgatgtgttcgttcatctcacagagtttaacctttcttttcatagagcagttaggaaacagtctgtttgtaaattctttaagtggatattctgacatcttgtggccttcgttggaaacgggatttcttcatattctgctagacagaaggattctcagtaacttccttgtgttgtgtgtattcaactcacagagttgaacgatcctttacacagagcagacttgaaacactctttttgtgaaatttgcaagtggagatttcagccgctttgaggtcaatagtagaaaaggaaatatcttcgtagaaaaactagacagaatgattctcagaaactcctttctgatgtgtgcattcaactcacagagtttcacctttcttttcatagagcagttaggaaacactctgtttgtaaagtctgcaagtggatattcagacctccttgaggccttcgttggaaacgggatttcttcatattctactagacagaatcattctcagaaactgctgcgtgatgtgtgcgttcaactctcagagtttaacttttcttttcattcagcggtttggaaacactctgtttctaaagtctgcacgtggaaattttgaccacttagaggccttcgttggaaacgggtttttttcatgtaaggctagacagaagaattcccagtaactttccttgtgttgtgtgcattcaactcacagagttgaacgttcccttagaccgagcagatttgaaacactctatttgtgcaatttgcaagtgtagttttcaagctctttaaggtcaacggcagaaaaggaaatatcttcgtttcaaaactagacagaatcattcccacaaactgcgttgtgatgtgttcgttcaactcacagagtttaacctttctgttcatagagcagttaggaaacactctgtttgtaaagtctgcaagtggatattcagacctcctagaggccttcgttggaaacaggatttcttcatattctgctagacagaagaattctcagtaacttccttgtgttgtgtttattcaactcacagagttgaatgatcctttacacagagcagacttgaaacactctttttgtggaatttgcaagtggagatttcagccgctttgtggtcaatggtagaaaaggaaatatcttcgtataaagactagacagaatgattctcagaaactcctttgtgatgtgtgtgttcaactcacagagtttaacctttcttttcatagagcagttaggaaacactctgtttgtaaagtctgcaagtggatattcagacctctttgaggccttcgttggaaactggtttttttcatgtaaggctagacagaagatttcccagtaacttccttgtgttgtgtgtgttcaactcacagagttgaactttcatttacacagagcagatttgaaacactctttttgtggaatttgcaaatggagatttcaagcgctttgaggccaaaggcagaaaaggaaatatcttcgtatgaaaactagacagaatcattctcagaaactgctctgcgatgtgtgcgttcaactctcagagtttaacttttcttttcattcagcagtttggaaacactctgtttgtaaagtctgcacgtggatatgttgaccacttagaggccttcgttggaaacgggtttctttcctgtaaggctagatagaagaattcccagtaacttccttgtgttgtgtacattcaactcacagagttgaacgttcccttagacagagcagatttgaaacactctttttgtgcaattggcaagtggagatttcaagcgctttaaggtcaatggcagaaaaggaaatatcttcgtttcaaaactagacagaatcattcccacaaactgcgttgtgatgtgttcgttcaactcacagagtttaaccattctgttcatagagcagttaggaaacactctgtttgtaaagtctgtaagtggatattctgacatcttgtggccttcgttggaaaagggatttattcatattctgctagacagaagaattctcagtaacttccttgtgttgtgtttattcaactcacagagttgaatgatcctttacacagagcagacttgaaacactgtttttgtggaatttgcaagtggagatttcagccgctttgaagtcaatggtagaaaagtaaatatcttcgtataaaaactagacagaatgattctcagaaactcctttgtgatgtgtgcgttcaactcacagagtttaacctttcttttcatagagcagttaggaaacactctgtttgtaaagtctgcaagtggatattcagacatctttgaggctttcgttggaaacgggatttcttcgtattctgctatacagaagaattctcagtaacttccttgtgttgtgtgtattcaactgacagagttgaactttcatttaggtagagcagatttgaaacactgtttttgtggaatttgcaagtggagatttcaagcgctttggggccaaaggcagaaaaggaaatatcttcgtataaaaactagacagaatcattctcagaaactgctgcgtgatgtgtgcgttcaactctcagagtttaacttttcttttcattcagcggtttggaaacactctgtttgtaaagtctgcacgtggaaattttgaccacttagaggccttcgttggaaacgggattttttcatgtaaggctagacagaagaattcccagtaacttccttgtgttgtgtgcattcaactcacagagttgaacgttcccttagacagagcagatttgaaacactctatttctgcaatttgcaagtgtagttttcaagctctttaaggtcaacggcagaaaaggaaatatcttcgtttcaaaactagacagaatgattctcagaaactcctttgtgatgtgtgcgttcaactcacagagtttaacctttcttttcatagagcagttaggaaacactctgtttgtaaagcctgcaagtggatattcagacatccttgaggctttcgttggaaacgggatttcttcatattctgctagaaagaagaattctgagtaacttccttgtgttgtgtgtattcaactcacagagttgaacgatcctttacacagagcagacttgtaacactctttttgtggaatttgcaagtggagatttcagccactttgaagtcaaaggtagaaaaggaaataagttcctataaaaactagacagaatgattctcagaaaatcctttgtgatgtgtgcgttcaactcacagagtttaacttttgttttcatagagcagttaggaaacactctgtttgtaaagtctgcaagtggatattcagacctctttgaggccttcattggaaacgggatttcttcatattatgctagacagaagaattcccagtaacttccttgtgttgtgtgttttttaagtcacagagttgaactttcatttacacagagcagatttgaaacactctttttgtggaatttgcaagtggagatttcaagtgctttgaggccaatggcagaaaaggaaatatcttcgtataaaaactagacagaatcattctcagaaactgctctgcgatgtgtgcgttcaactctcagagtttaacttttcttttcattcaacagtttgaaaacactctgtttgtaaagtctgcacgtggatattttgaccacttagaggccttcgttggaaacgggtttttttcctgtaaggctagacagaagaattctcagtaacttccttctgttgtgtgtattcaactcacagagttcaacgatcctttacacagagcagacttgaaacactctttttgtggaatttgcaagtggacatttcagccgctttgaggtcaatggtagaaaaggatatatcttcgtataaaaactagacagaattattctcagaaactcctttgtgatgtgtgcgttcaactcacagagtttaacctttcttttcgtagagcagttaggaaacactctgtttgtaaagtcggcaagtggatattcagacctctttggggccatcgttggaaatgggatttcttcatattctgctagacagaagaattctcagtaacttccttgtgttgtgtgtattcaactgacagagttgaacgatcctttacacagagcagacttgaaacacactttttgtggattttgcaagtggagatttcagcctctttgagatcaatggtagaataggaaatatcttcctatagaaactagacagaatgattctcagaaactcctttgtgatgtgtgcgttcaagtcacagagtttaacctttcttttcatagagcagttaggaaacactctgtttgtaaagtctgcaagtggatattcagacctctttgaggccttcgttggaaacgggtttttttcatataaggctagacagaagaattctcagtaacttccttgtgttgtgtgtattcaactgacagagttgaactttcatttagagagagcagatttgaaacactgtttttgtggaatttgcaagtggagatttcaagccctttggggccaaaggcagaaaaggaaatatcttcgtgtaaaaattagacagaatcattctcagaaactgctgcgtgatgtgtgcgttcaactctcagagtttaacttttcttttcattcagcggtttggaaacactctgtttgtaaagtctgcacgtggatattttgaccacttagaggccttcgttggaaacgggtttttctcatgtaaggctagacagaagaattcccagtaacttccttgtgttgtgtacattcaactcacagagttgaacgttcccttagacagaggagatttgaaacactctttttgtgcaattggcaagtggagatttcaagcgctttaaggtcaatggcagaaaaggaaatatcttcgtttcaaaactagacagaatgattctcagaaactactttgtgatgtgtgcgttcaactcacagagtttaacctttcttttcctagagtagttaggaaacactctgtttgtaaagtctgcaagtggatattcagacctctttgtggccttcattggaaacgggatttcttcatattatgctagacagaagaattctcagtaacttccttgtgttgtgtgcattcatatcacagagttgaacgatcctttacgcagagcagattagaaacactctttttgtggaacttgcaattggagatttcagccgctttgaggtcaatggtagaaaaggaaatatctttgtataaaaactagacagaatgattctcagaaactcctttgtgatgtgtgcgttcaactcacagagtttaacctttcttttcatagagcagttaggaaacactctgtttgtaaagtctgcaagtggatattcagacctctttgaggccttcgttggaaacgggtttttttcatataagcctagacagaagaattcccagtaacttccttgtgttgtgtgtgttcaactcacagagttgaactttcatttacacagagcagatttgaaacactctttttgtggaatttgcaggtggagatttcaagcgctttgaggccaaaggcagaaaacgaaatatcttcgtataaaaactagacagaatcattctcagaaagtgctctgcgatgtgtgtgttcaactctcagagtttaacttttcttttcattcagcagtttggaagcactctgtttgtaaagtctgcacgtggataatttgaccacttagaggccttcgttggaaacgggtttttttcctgtaaggctagacagaagaattcccagtaacttccttgtgttgtgtacattcaactcacagagttgaacgttcccttagacagagcagatttgaaacactctttttgtgcaattggcaagtggagatttcaagcgctttgaggtcaatggcagaaaaggaaatatcttcgtttcaaaagtagacagaatcattcccacaaactgcgttgtgatgtgttcgttcaactcacagagtttaacctttctgttcatagagcagttaggaaacactctgtttgtaaactctgtaagtggatattctgacatcttgtggccttcgttggaaacgggatttcttcacattctgctagacagaagaattctcagtaacttccttgtgttgtgtgtattcaactcacagagttgaacgatcctttacacagagcagacttgtaacactctttttgtggaatttgcaagtggagatttcagccgctttgacgtcaaaggtagaaaaggaaatatcttcctataaaaactaggcagaatgattctcagaaaatcttttgtgatgtgtgcgttcaactcacagagtttaacttttgttctcatagagcagttaggaaacactctgtttgtaaagtgtgcaagtggatattcagacctctttgaggccttcgttggaaacgggatttcttcatattctgctagacagaagaattcccagtaacttccttgtgttgtgtgtgttcaactcacagagttgaacgatcctttacacagagcagacttgtaacactctttttgtggaatttgcaaatggagatttcaagcgctttgaggccaaaggcagaaaaggaaatatcttcgtataaaaactagacagaatcattctcagaaactgctctgcgatgtgtgcgttcaactctcagtgtttaacttttcttttcattcagcagtttggaaacactctgtttgtaaagtctgcacgtggataacttgaccacttagaggccttcgttggaaacgggtttttttcatgtaaggctagacagaagaattctcagtaacttccttgtgttgtgtgtattcaactgacagagttgaacgatcctttacacagagcagacttgtaacactctttttgtggaatttgcaagtggagatttcagccgctttgaagtcaaaggtagaaaaggaaatatcttcctataaacactagacagaatcattcccacaaactgcgttgtgatgtgttcgttcatctcacagagtttaacctttcttttcatagagcagttaggaaacagtctgtttgaaaattctgtaaggggatattctgacatcttgtggccttcgttggaaacgggatttcttcatattctgctagacagaagaattctcagtaacttccttgtcttgtgtgtattcaactcacagagttgaacgatcctttacacagagcagacttgaaacactctttttgtggaatttgcaagtggagatttcagccgctttgaggtcaatggtagaaaaggaaatatcttcgtataaaaactagacagaatgattctcagaaactcctttgtgatgtgtgtgttcaactcacagagtttaacctttcttttcatagagcagttagtaaacactctgtttataaattctgcaagtggatattcagacccctttgaggccttcgttggaaacgggatttcttcatattatgctagacagaagagttcccagtaacttccttgtgttgtgtgtgttcaactcacagagttgaactttcatttacacagagcagatttgaaacactctttttgtggaatttgcaagtggagatttcaagcgctttgaggacaaaggcagaaaaggaaatatcttcgtataaaaactagacagaatcattctcagaaactgctctgtgatgtgtgcgttcaactctcagagtttaacttttcttttcattcagcagtttggaaacactctgtttctaaagtctgcacgtggataatttgaccacttagaggccttcgttggaaacgggtttttttcatgtaaggctagacagaagaattcccagtaacttccttgtgttgtgtacattcaactcacagagttgaacgttcccttagacagaacacatttgaaacactctttttgtgcaattggcaagtggtgatttcagccgctttgaggtcaatggtagaaaacgaaatatcttcgtataaaaactagacagaatcattcccacaaactgcgttgtgatgtgttcgttcaactcacagagtttaacctttctgttcatagagcagttaggaaacactctgtttgtaaagtctgtaagtggatattctgacatcttgtggtcttcgttggaaacgggatttcttcatattctgctagacagaagaattctcagtcacttccttgtgttgtgtgtattcaactcacagagttgaacgatcctttacacagagcagacttgaaacactctttttgtggaatttgcaagtggagatttcagccgctttgaggtcaattgtagaataggatatatcttcgtatagaaactagacagaatgattctcagaaactccttagtgatgtgtgcgttcaactcacagagtttaacctttctgttcatagagcagttaggaaacactctgtttgtaaagtctgcaagtggatattcagacctccttgaggccttcgttggaaacgggatttcttcatattctgctagacagaagaattcccagtaacttccttgtgttgtgtgtgttcaactcacagagttgaactttcatttacacagagcagatttgaaacactctttttgtggaatttgcaaatggagatttcaagcggtttgaggccaaaggcagaaaaggaaatatcttcgtataaaaactagacagaatcattctcagaaactgctgcgtgatgtgtgcgttcaactctcagagtttaacttttcttttcattcagcggtttggaaacactctgtttgtaaagtctgcacgaggaaattttgaccacttagaggccttcgttggaaacgggtttttttcatctaaggctagacagaagaattcccagtaacttccttgtgttgtgtgcattcaactcacagagttgaacgttaccttagacagagcagatttgaaacactctatttgtgcaatttgcaagtgtagatttcaagcgctttaaggtcaacggcagaaaaggaaatatcttcgtttcaaaactagacagaatcattcccacaaactgcgttgtgatgtgttcgttcaactcacagagtttaacctttctgttcatagagcagttaggaaacactctgtttgtaaagtctgtaagtggatattctgacatcttgtggccttcgttggaaacgggatttcttcatattctgctagacagaagaattctcagaaacttccttgtgttgtgtgttttcaactcacagagttgaacgatcctttacacagagcagacttgaaacactccttttgtggaatttgcaagtggagatttcatccgctttgaggtcaatggtagaataggaaatatcttcctatagaaagtagacagaatgattctcagaaactcctttgtgatgtgtgcgtacaactcacagagtttaacctttcttttcatagagcagttaggaaacactctgtttgtaaagtctgcaagtggatattcagacctctttgaggccttcgttggaaacgggtttttttcatataaggctagacagaagaattcccagtaacttccttgtgttgtgtgtgttcaactcacagagttgaactttcatttacacagagccgatttgaaacactctttttgtggaatttgcaagtggagatttcagccgctttgaggtcaatggtagaaaaggaaatatcttcgtataaaaactagacagaatgattctcagaaagtcctttgtgatgtgtttgttcaactcacagagtttaacctttcttttcatagagcagttaggaaacactctgtttgtaaagtctgcaagtggatattcagacctctttgaggccttcgttggaaacgggatttcttcatattctgctagacagaagaattctcagtaacttccttgtgttgtgtgtattcaactcacagagttgaacgatcctttacacagagcagacttgaaacactctttttgtggaatttgcaactgtagatttcaagcgctttaaggtcaatggcagaaaaggaaatatcttcgtttcaaaactagacagaatcattcccacagactgcgttgtgatgtgttcgttcaaatcacagagtttaacctttcttttcatagagcagttaggaaacagtctgtttgtaaattctgtaagtggatattctgacaacttgtggccttcgttggaaacgggatttcttcatattctgctagacagaataattctcagtaacttccttgtgttgtgtgtattcaactcacagagttgaacgatcctttacacagagcagaattgaaacactctttttgtggaatttgcaagtcgagatttcagccgctttgaggtcaatagtagaaaaggaaatatcttcgtagaaaaactagacagaatgattctcagaaactcctttgtgatgtgtgcgttcaactcacagagtttaacctttcttttcatagagcagttatgaaacactctgtttgtaaagtctgcaagttgatattcagacctccttgaggccttcgttggaaacgggatttcttcatattatgctagacagaagaattcccagtaacttccttgtgttgtgtgtgttcaactcacagagttgaactttcatttacacagagcagatttgaaacactctttttctggaatttgcaaatggagatttcaagcgctttgaggccaaaggcagaaaaggaaatatcttcgtataaaaactagacagaatcattctcagaaactgctctgcgatgtgtgcgttcaactctcagagtttaacttttcttttcattcagcagtttggaaacactctgtttgtaaagtctgcacgtggatattttgaccacttagaggccttcgttggaaacgggctttttcctgtaaggctagacagaaagaattcccagtaacttccttgtgttgtgtacattcaactcacagagttgaacgttcccttagacagagcagatttgaaacactctttttgtgcaattggcaaatggagatttcaagcgctttaaggtcaatggcagaaaaggaaatatcttcgtttcaaaactagacagatgattctcagaaactcctttgtgatgtgtgcgttcaactcacacagtttaacctttctttccatagagcagttaggaaacactctgtttgtaaagtctgcaagtggatattcagacctcctacaggccttcgttggaaacgggatttcttcatattatgctagacagaagaattctcagtaacttccttgtgttctgtgtattcaactcacagagttgaacgatactttacacagagcagacttgaaacactctttttgtggaatttgcaagtggagatttcagccgctttgaggtcaattgtagaaaaagaaatatcttcgtatagaaactagacagaatgattctcagaaactcctttgtgatgtgtgcgttcaactcagagagtttaacctttcttttcatagagcagttaggaaacacgctgtttataaagtctgcaagtggatattcagacccctttgaggccttcgttggaaacgggatttcttcatattatgctagacagaagaattcccagtaacttccttgtgttgtgtgtgttcaactcacagagttgaactttcatttacacagagcagatttgaaacactctttttgtggaatttgcaagtggagatttcaagcgctttgaggccaaaggcagaaaagcaaatatcttcgtataaaaactagacagaatcattctcagaaactgctctgcgatgtgtgcgttcaactctcagagtttaacttttcttttcattcagcagtttggaaacactctgtttgtaaagtctgcacgtggataatttgaccacttagaggccttcgttggaaacgggattttttcatgtaaggctagacagaagaattcccagtaacttccttgtgttgtgtacattcaactcacagagttgaacgttccgttagacagagcagatttgaaacactctttttgtgcaattggcaagtggagatttcaagcgctttgaggtcaatggcagaaaaggaaatatcttcgtttcaaaactagacagaatcattcccacaaactgcgttgtgatgtgttcgttcaactcacagagtataacctttctgttcatagagcagttaggaaacactctgtttgtaaagtctgtaagtggatattctgacatcttgtggccttcgttggaaacgggatttcttcatattctgctagacagaagaattctcagaaacttccttgtgttctgtgttttcaactcacagagttgaacgatgctttacacagagtagacttgaaacactctttttgtggaatttgcaagtggagttttcagccgctttgaggtcaatggtagaaaaggaaatatcttcgtataaaaactagacagaatgattctcagaaactactttgtgatgtgtgcgttcaactcacagagtttaacctttcttttcatagagcagtgaggaaacactctgtttgtaaagtctgcaagtggatattcagacctccttgatgccttcgttggaaacgggatttcttcatattatgctagacagaagaattcccagtaacttcccttgtgttgtgtgtgttcaactcacagagttgaactttcatttacacagagcagatttgaaacactctttttgtggaatttgcaagtggagatttcaagcgctttgaggccaaaggcagaaaaggaaatatcttcgtataaaaactagacagaatcattctcagaaactgctctgcgatgtgtgcgttcaactctcagagtttaacttttcttttcattcagcagtttggaaacactctgtttgtgaagtctgcacgtcgatattttgaccacttagaggccttcgttggaaacgggtttttttcctgtaaggctagagagaagaattcccaggaacttccttgtgttgtgtacattcaactcacagagttgaacgttcccttagacagagcagatttgaaacactctttttgtgcaattggcaagtggtgatttcagccgctttgaggtcaatggtagaaaaggaaatatcttcgtataaaaactagacagaatgattctcagaaacttcattgtgacgtgtgcgttcaactcacagagtttaacctttcttttcatagagcagttaggaaacactctgtttgtaaagtctgcaagtggatattcagacctctttgaggccttcgttggaaacgggatttcttcataatgtgctagacagaagaattctcagtaacttccttgtgttgtgtgtattcaactcacagagttgaacgatcctttacacagagcagacttgaaacactctttttgtggaatttgcaagtggagatttcatccgctttgaggtcaatggtagaataggaaatatcttcctatagaaactagacagaatgattctcataaactcctttgtgatgtgtgcgttcaactcacagagtttaacctttcttttcatagagcagttaggaaacactctgtttgtaaagtctgcaagtggatattcagacctccttgaggccttcgtttgaaacgggatttcttcatattctgctagacagaagaattcccagtaacttccttgtgttgtgtgtgttcaactcacagagttgaactttcatttacacagagcagatttgaaacactctttttgtgcaatttgcaagtggagatttcaagcgctttgagaccaaaggcagaaaaggaaatatcttcgtttcaaaactagacagaatcattctcagaaactgctctgcgatgtgtgcgttcaactctcagagtttaacttttcttttcattcagcagtttggaaacactctgtttgtaaagtctgcacgtggatatgttgaccacttagaggccttcgttggaaacgggtttttttcatgtaaggctagacagaagaattcccagtaacttccttgtgttgtgtgcattcaactcacagagttgaactttcccttagacagagcagatttgaaacactctatttgtgcaatttgcaagtgtagatttcaagcgctttaaggtcaacggcagaaaaggaaatatcttcgtttcaaaactagacagaatcattcccacaaactgcgttgtgatgtgttcgttcaactcacagagtttaacctttcttttcatagagcagttaggaaacagtctgtttgtcaattctgtaagtggatattctgacatcttgtggccttcgttggaaacgggatttcttcatattctgctagacacaagaattttcagtaacttccttgtgttgtgtgtattctactcacagagttgaacgatcctttacacagagcagacttgaaacactctttttgtggaatttgcaagtggagatttcagccgctttgaggtcaatggtagaaaaggaaatatcttcgtataaagactagacagaatgattctcagaaactcctttgtgatgtgtgcgttcaactcacagagtttaacctttcttttcatggagctgttaggaaacactctgtttgtaaagtctgcaagtggatattcagacctctttgaggccttcgttggaaacgggatttcttcatactgtgctagacagaagaattctcagtaactttcttgtgttgtgtgtattcaactgacagagttgaactttcatttagagagagcagatttgaaacactgtttttgtggaatttgcaagtggagatttcaagcgctttggggccaaaggcagaaaaggaaatatcttcgtataagcactagacagaatcattctcagaaactgctctgcgatgtgtgcgttcaactctcagagttaaacttttcttttcattcagcagtttggaaacactctgtttgtaaagtctgcacgtggatattttgaccacttagaggccttcgttggaaacgggtttttttcctgtaaggctagacagaagaattcccagtaacttccttgtgttgtgcgcattcaactcacagagttgaacgttcccttagacagagcagatttgaaacagcctatttgtgcaatttgcaagtgtacatttcaagcgctttaaggtcaacggcagaaaaggaaatatcttcctttcaaaactagacagaatcactcccacaaactgcgttgcgatgtgttcgttcaactcacagagtttaacatttcttttcatagagcacttaggaaacagtctgtttgtaaattctgtaagtggatattctgacatcttgtggccttcgttggaaacgggatttcttcatattctgctagacagaagaattctcagtaacttccttgtgttgtgagtattcaactcacagagttgaacgatcctttacacagagcagacttgaaacactctttttgtggaatttgcaagaggagatttcagccgctttgaggtcaatagtagaaaaggaaatatcttcgtagaaaaactagacagaatgattctcagaaactcctttgtgatgtgtgcgttcaactcacagagtttaacctttcttttcatagagcagttaggaaacactctgtttgtaaagtctgcaagtggatattcagacctctttgaggccttcgttttaaacgggatttcttcatattatgctagacagaggaattcccagtaacttccttgtgttgtgtgtgttcaactcacagagttgaactttcatttacacagagcagatttgaaacactctttttgtggaatttgcaagtggagatttcaagcgctttgaggccaaaggcagaaaaggaaatatcttcgtttcaaaactaggcagaatcattctcagaaactgctctgcgatgtgtgtgttcaactctcagagtttaacttttcttttcattcagcagtttggaaacactctgtttgtaaagtctgcacgtggataatttgaccacttagaggccttcgttggaaacgggtttttttcagtaaggctagatagaagaattcccagtaacttccttgtgttgtgtgcattcaactcacagagttgaacgttcccttagacagagcagatttgaaacactctatttgtgcaatttgcaagtgtagatttcaaccgctttaaggtcaacggcagaaaaggaaatatcttcgtttcaaaactagacagaaatcattcccacaaactgcgttgtgatgtgttcgttcaactcacagagtttaacctttcttttcatagagcagttaggaaacagtctgtttgtcaattctgtaagtggatattctgacatcttgtggcattcgttggaaacgggatttcttcatattctgctagacagaagaactctcagaaacctcctggtgttgcgtgttttcaactcacagagttcaacgatccgttacacagagtagacttgaaaaactctttttgttgaattggccagtggagatttcagccgctttgaggtcaatggtagaaaaggaaatatcttcgtataaaaactagacagaacgattctcagaaactcctttgtgatgtgtgtgttcaactcacagagtttaacctttcttttcatagagcagttaggaaacactctgtttgtaaagtctgcaagtggatattcagacctctttgaggccttcgttggaaacgggatttctccatattctgctagacagaagaattctcagtaacttccttgtgttgtgtgtattcaactgacagagttgaactttcatttagagagagcagatttgtaagactgtttttgtggaatttgcaagtggagatttcaagcgctttgcggccaaaggcagaaaaggaaatatcttcgtataaaaactagacagaatcattctcagaaactgctctgtgatgtgtgcgttcaactctcagagtttaacttttcttttcattcagcagtttcgaaacactctgtttgtaaagtctgcacgtggatattttgaccacttagaggccttcgttggaaacgggttttcttcatgtaaggctagacagaagaattcccagtaacttccttgtgttgtgtgcattcaactcacacagatgaacgttcccttagacagagcagatttgaaacactctatttgtgcaatttgcaagtgtagatttcaagcgctttaaggtcaatggcagaaaaggaaatatcttcgtttcaaaactagacagaatgattctcagaaactcctttgtgatgtgtgcgttcaagtcacagagtttaacctttcttttcatagagcagttaggaaacactctgtttgtaaagtctgcaagtggatattcagacctccttgaggccttcgttggaaacgggatttcttcctattatgctagacagaagaattctcagtaacttccttgtgttgtgtgtattcaactcacagagttgaaccatcctttacacagagcagacttgaaacactctttttgtggaatttgcaagtggagatttcagccgctttgaggtcaatggtagaaaaggaaatatcttcgtataaaaactagacagaaatgattctcagcaaactcctttgtgaggtgtgtgttcaactcacagagtttaacctttcttttcatagagcagttagtaaacactctgtttataaagtctgcaagtggatattcagacccctttgaggccttcgttggaaacgggatttcttcatattctgctagacagaagaattctcagtaacttccttgtgttgtgtgtattcaactgacagagttgaactttcatttagagagagcagatttgaaacactgtttttgtggaatttgcaagtggagatttcaagcgctttggggccaaaggcagaaaaggaaatatcttcgtataaaaactagtcagaatcattctcagaaactgctgcgtgatgtgtgcgttcaactctcagagtttaacttttcttttcattcagcggtttggaaacactctgtttgtaaagtctggacgtggaaattttgaccacttagaggccttcgttggaaacgggtttttttcatgtaaggctagacagaagaattcccagtaacttccttgtgttgtgtgcattcaactcacagagttgaacgttcccttagacagagcagatttgaaacactctatttgtgcaatttgcaagtgtagttttcaagctcttttaggtcaacggcagaaaaggaaatatcttggtttcaaaactagacagaatcattctcagaaactgctctgcgatgtgtgcgttcaactctcagagtttaacttttcttttcattcagcagtttggaaacactctgtttgtgaagtctgcacgtggataatttgaccacttagaggcctacgttggaaacgggtttttttcatgtaaggctagacagaagaattctcagaaacttccttgtgttgtgtgttttcaactcacagagttaaacgatccattacacagagtagacttgaaacactctttttgtggaattggcaagtggagatttcagccgctttgaggtcaatggtagaataggaaatatcttcctatggaaactagacagaatgattctcagaaactcctttgtgatgtgggcgttcaactcacagagttcaacctttcttttcatagagcagttgggaaacactctgtttgtaaagtctgcaagtggatattcagacttctttgaggccttcgttggaagcgggatttcttcatattctgctagacagaagaattcccagtaacttccttgtgttgtgtgtgttcaactcacagagttgaactttcatttacacagagcagatttgaaacactctttttgtggaatttgcaagtggagatgtcaagcgctttgaggccaaaggcagaaaaggaaataccttcgtttcaaaactagacagaatcattctcagaaactgctctgcgatgtgtgcgttcaactctcagagtttaacttttcttttcattcagcagtttggaaacactctctttgtaaagtctgcacttggatattttgaccacttagaggccttcgttggaaacgggtttttttcctgtaaggctagacagaagaattcccagtaacttccttgtgttgtgtacattcaactcacagagttgaacgttcccttagacagagcagatttgaaacactctttttgtgcagttggcaaatggagatttcaagcgctttaaggtcaatggcagaaaaggaaatatcttcgtttcaaaactagacagaatcattcccacaaactgcgttgtgatgtgttcgttcaactcacagagtttaacaattcttttcatagagcagttaggaaacactctgtttgtaaattctgtaagtggatattctgacatcttttggccttcgttggaaacgggatttcttcatattctgctagacagaagaattctcagtaacttccttgtgttgtgtgtattcaactcacagagttgaacgatcctttacacagagcggacttgaaacactcgttttgtggaatttgcaagtggaggtttctgccgcgttgaggtcaatggtagaaaaggaaatatcttcgtataaaaactagacagaatgattctcagaaactcctttgtgatgtgtgagttcaactcacagagtttaacctttcttttcatagagcagttaggaaacactctgtttgtaaagtctgcaagaggatattcagacctctttgaggccttcgttggaaacgggttttattcatataaggctagacagaagaattctcagtaacttccttgtgttgtgtgtattcaactcacagagttgaacgatcctttacacagagcagacttgaaacactctttttgtggaaattgcaagtggagatttcagccgctttgaggtcaatgatagaaaaggaaatatcttcgtataaaaactagacagaatcattctcagaaactgctgcgtgatgtgtgggttcaactctcagagtttaacttttcttttcattcagcggtttggaaacactctgtttgtaaagtctgcacgtggaaattttgaccacttagaggccttcgttggaaacgggtttttttcatgtaaggctagacagaagaattcccagtaacttccttgtgttgtgtgcattcaactcacagagttgaacgttcccttagacagagcagatttgaaacactctatttgtgcaatttgcaagtgtagatttcaagcgcattaaggtcaatggcagaaaaggaaatatcttcgtttcaaaattagacagaatcactcccacaaactgcgttgtgatgtgttcgttcaactcacagagtttaacctttcttttcttagagcagttaggaaacagtctgtttgaaaattctgtaagtggatattctgacatcttgtggccttcgttggaaacgggatttcttcatattctgctagacagaataattctcagtaacttccttgtgttgtgtgtattcaactcacagagttgaacgatcctttacagagagcagacttgaaacactctttttgtggaatttgcaagtggagaattcagccgctttgaggtcaatggtagaaaaggaaatatcttcgtataaagactagacagaatgattctcagaaactcctttgtgatgtgtgcgttaaactcacagagtttaacttttcttttcatagagcagttaggaaacactctgtttgtaaagtctgcaagtggatattcagacctctttgacgccttcgttggaaacgggatttcttcatattctgctagacagaagaattctaagtaacttccttgtgttgtgtgtattcaactgacagagttgaactttcatttagagagagcagatttgaaacactgtttttgtggaatttgcaagtggagatttcaagcgctttggggccaaaggccgaaaagtaaatatcttcgtataaaaactagacagaatcattctcaaaaactgctgcgtgatgtttgcgttcaactctcagagtttaacttttcttttcattcagcggtttggaaacactctgtttgtaaagtttgcacgtggatattttgaccacttagaggccttcgttggaaacgggtttttttcatgtaaggctagacagaagaattcccagtaacttccttgtgttgtgtgcattcaactcacagagttgaacagttcccttagacagagcagatttgaaacactctatttgtgcaatttgcaagtgtagatttcaagcgctttaaggtcaatggcagaaaaggaaatatcttcgtttcaaaactagacagaatgattctcagaaactcctttgtgatgtgtgcgttcaactcacagagtttaacctttcttctcatagagcagttaggaaacactctgtttgtaaagtctgcaagtggatattcagacctcttttaggccttcgttggaaacgggatttcttcatattctgctagacagaagaattctcagtaacttccttgtgttgtgtattcaactcacagagttcaacgatcctttacacagagcagacttgaaacactctttttgtggaatttgcaagtggggatttcagccgctttgaggtcaatgttagaaaaggaaatatcttcgtataaaaactagacagaatgattctcagaaactcctttgtgatgtgtgcgttcaactcacagagttcaacctttcttttcatagagcagttaggaaacactctgtttataatgtctgcaattggatattcagacctctttgaggccttcgttggaaacgggatttcttcatattctgctagacagaagaattcccagtaacttccttgtgttgtgtgtgttcaactcacagagttgaactttcgtttacacagagcagatttgaaacactctttttgtggaatttgcaagtggagatttcaagcgctttgaggccaaaggcagaaaaggaaatatcttcgtataaaaactagacagaatcattctcagaacctgcttcgtgatgtgtgcgttcaactctcagagtttaacttttcttttcattcagcggtttggaaacactctgtttgtaaagtctgcacgtggaaattttgaccacttagaggccttcgttggaaacgggtttttttcatgtaaggctagacagaagaattcccagtaacttccttgtgttgtgtgcattcaactcacagagttgaacgttcccttagacagagcagatttgaaacactctatttgtgcaatttgcaagtgtagatttcaagcgctttaaggtcaatggcagaaaaggaaatatcttcgtttcaaaactagacagaatcattcccacaaactgcgttgtgatgtgttcgttcaactcacagagtttaacctttctattcatagagcagttaggaaacactctgtttgtaaagtctgtaagtggatattctgacatcttgtggccttcgttggaaacgggatttcttcatattctgctagacagaagaattctcagtaacttccttgtgttgtgtgtattcacctcacagagttgtatgatcctttacacagaagagtcttgaaacactctttttgtggaatttgcaagtggagatttcagccgctttgaagtcaatggtagaataggaaatatcttcctatagaaactagacagaatgattctcataaactcctttgtgatgtgtgcgttcaactcacagagtttaacctttcttttcatagagcagttaggaaacactctgcttgtaaagtctgcaagtggatattcagccctctttgaggccttcgttggaaacgggtttttttcatataaggctagacagaagaattcccagtaacttccttgtgttgtgtgtgttcaactcacagagttgaactttcatttacacagagcagatttgaaacactctttttgtggaatttgcaaatggagatttcaagtgctttgaggccaaaggcagaaaaggaaatgtcttcgtttcaaaactagacagaatcattctcagaaactgctctgcgatgtgtgcgttcaactctcagagtttaacttttcttttcattcagcagtttggaaacactctgtttgtaaagtctgcacctggataacttgaccacttagaggccttcgttggaaacgggtttttttcctgtaaggctagacagaagaattcccagtaacttccttgtgttgtgtgcattcaactcacagagttgaacgttcccttagacagagcagatttgaaacactctatttgtgcaatttgcaagtgtacatttcaagcgctttaaggtcaacggcagaaaaggaaatatcttcgtttcaaaactagacagaatgattctaagaaacttctttgtgatgtgtgcgttcaactcacagagtttaacctttcttctcatagagcagttaggaaacactctgtttgtaaactctgcaagtggatattcagacctctttgaggccttcgttggaaacgggatttctccatactgtgcgagacagaagaattctcagtaacttccttgtgttgtgtggattcaactcacagagttgaacgatcctttacagagagcggacttgaaacactcgttttgtggaatttgcaagtggagatttcagccgctttgaggtcaatggtagaaaaggaaatatcttcgtacaaaaactagacagataatcattcccacaaactgcgttgtgatgtgttcgttcaactcacagcgttttacctttctgttcatagagcagttaggaaacactctgtttgtcaagtctgtaagtggatattctgacatcttgtggccttcgttggaaatgggatttcttcatattctgctagacagaagaattcccagtaacttccttgtgttgtgtgtattcaactcacagagttgaactttcatttacacagagcagattggaaacactctttttgtggaatttgcaagtggagatttcaagcgctttgaggccaaatgcagaaaaggaaatatcttcgtataaaaactagacagaatcattctcagaaactgctctgcgatgtgtgcgttcaactctcagagtttaacttttcttttcattcagcagtttggaaacactctgtttgtaaagtctgcacgtggatattttgaccacttagaggccttcgttggaaacgggtttctttcttgtaaggctagacagaagaattctcagtaacttccttgtgttgtgtgtattcaactcacagagttgaatgatcttttacacagaacagacttgaaacactctttttgtggaatttgcaagtggagatttcagccgctttgaggtcaatggtagaaaaggaaatatcttcgtataaaaactagacagaatgattctcagaaactcctttgtgatgtgtgcgttcaactcacagagtttaacctttcttttcatagagcagttaggaaacactctgtttgtaaagtctggaagtggatattcagacctctttgaggccttcgttggaaacgggatttcttcatattctgctagagagaagaattctcagtaacttccttgtgttgtgtgtattcaactcacagagttcaacgatcctttacacagagcagacttgaaacactctttttgtggaatttgcaagtggagatttcagccgctttgaggtcaatggtagaataggaaatatcttcctatagaaactagacagaatgattctcagaaactcctttgtgatgtgtgcgttcaactcacagactttaacctttcttttcatagagcagttaggaaacactctgtttgtaaagtctgcaagtggatattcagacctccttgaggccttcgttggaaacgggatttcttcatattatgctagacagaagaattctcagtaacttccttgtgttgtgtgtattcaactgacagagttgaactttcatttggagagagcagatttgaaacactgtttttgtggaatttgcaagtggagatttcaagcgctctggggccaaaggcagaaaaggaaatatcttcgtataaaaactagacagaatcattctcagaaactgctgtgtgatgtgtgcgttcaactctcagagtttaacttttcttttcattcagcggtttggaaacactctgtttgtaaagtctgcacgtggatattttgaccacttagaggccttcgttggaaacgggtttttttcatgtaaggctagacagaagaattctcagtaacttccttgtgttgtgtgtattcaactcacagagttgaacgatcctttacacagagcagacttgaaacactctttttgtggaatttgcaagtggagatttcagccgctttgagttcaatggtagaataggaaatatcttcctatagacactagacagaatgattctcagaaactcctttgtgatgtgtgcgttcaactcacagagttcaacctttcttttcatagagcagttgggaaacactctgtttgtaaaatctgcaagtggatattcagacttctttgaggccttccttggaagcgggatttcttcatattcagctagacagattaattctcaataacttccttgtgttgtgtgtattcaactcacagagttgaacgatcctttacagagagcagacttgaaacactctttttgtggaatttgcaagtggagatttcagccgctttgaggtcaatggtagaatagggaatatcttcctatagaaactagacagagtgattctcagaaactcctttgtgatatctgcgttcaactaacagagtttaaactttcttttcatagagcagttaggaaacactctgtttgtaaagtctgcaagtggatattcagacctccttgaggccttcgttggaaacgggatttcttcatattctgctatacagaagaattctcagtaactgccttgtgttgtgtgtattcaactcacacagttgaacgatcctttacacagagcagacttgaaacactctttttgtggaatttgcaagtggagatttcagccgctttgaggtcaatggtagaataggaaatatcttcctatagaaactagacagaatgattctcagaaactcctttgtgatgtgtgcgttcaactcacagagtttatcctttcttttcatagagcagttgggaaacactctgtttgtaaagtctgcaagtggatattcagacatccttgaggctttcgttggaaacgggatttcttcatattctgctagaaagaagaattcccagtaacttccttgtgttgtgtgcattcaactcacagagttgaacgttcccttagagagagcagatttgaaacactctatttgtgcaatttgcaagtgtagatttcaagcgctttaaggtcaatggcagaaaaggaaatatcttcgtttcaaaactagacagaatcattcccacaaactgcgttgtgatgtgttcgttcaactcacagagtttaacctttccgttcatagagcagttaggaaacacactgtttgtaaagtctgtaagtggatattctgacatcttgtggccttcgttggaaacgggatttcttcatattctgctagacagaagaattctcagtaacttccttgtgttgtgtgtattcaactcacagagttgaactgatcctttacacagagcagacttgaaacactctttttgttgaatttgcaagtggagatttcagccgctttgaggtcaatagtagaaaaggaaatatcttcgtagaaaaactagacagaatgattctcagaaactcctttgtgatgtgtacgttcaactcacagagtttaacctttcttttcttagagcagttaggaaacactctgtttgtaaagtctgcaagtggatattcagacctctttgagtccttcgttggaaacgggtttttttcatataaggctagacagaagaattcccagtaacttccttgtgttgtgtgtgttcaactcacagagttgaactttcatttacacagagcagatttgaaacactccttttgtggaatttgcaagtggagatttcaagcgctttgaggccaaaggcagaaaaggaaatatcttcgtttcaaaactagacagaatcattctcagaaactgctgcgtgatgtgtgcgttcaactctcagagtttaacttttcttttcattcagcggtttggaaacactctgtttgaaaagtctgcacgtggatattttgaccacttagaggccttcgttggaaacgggtttttttcatgtaaggctagagagaagaattcccactaacttccttgtgttgtgtacattcaactcacagagttgaacgttcccttagacagagcagacttgtaacactctttttgtggaatttgcaagtggagatttcagccgctttcaagtcaaaggtagaaaaggaaatatcttcctataaaaactagacagaatcattcccacaaactgcgttgtgatgtgttcgttcaactcacagagtttaacctttctgttcatagagcagttaggaaacactctgtttgtaaagtctgcaagtggatattcagacctctttgaggccttcgttggaaacgggatttcttcatattctgctagacagaagaattctcagtaacttccttgtgttgtgtgtattcaactcacacagttgaacgatcctttacacagagcagacttgtaacactctttttgtggaatttgcaagtggagatttcagccgcttttaagtcaaaggtagaaaaggaaatatcttcctataaaaactagacagagtgattctcagaaactcctttgtgatgtctgcgttcaactcacagagtttaacctttcttttcatagagcagttaggaaacactctgtttgtaaagtctgcaagtgcatattcagacctccttgaggccttcgttggaaacgggatttcttcatattctgctatacagaagaattctcagaaacttccttgtgttttgtgtgttcaactcacagagttgaacgatcctttacacagagcagacttgaaacactctttttgtggaatttgcaagtggagatttcagccgctttgaggtcaatggtagaaaaggaaatatcttcgtataaaaactagacagaatcattctcagaaactgctgcgtgatgtgtgcgttcaactctcagagtttaccttttcttttcattcagcggtttggaaacactctatttgttaaagtctgcacgtggatattttgaccacttagaggccttcgttggaaacgggattttttcatgtaaggctagacagaagaattcccagtaacttccttgtgttgtgtgcattcaactcacagagttgaacgttcccttagacagagcagatttgaaacactctatttgtgcaatttgcaagtgtagatttcaagcgctttagggtcaaaggcagaaaaggaaatatcttcgtttcaaaactagacagaatcattcccacaaactgcgttgtgatgtgttcgttcaaatcacagagtttaacctttcttttcatagagcagttaggaaacagtctgcttgtaaattctgtaagtggatattctgacatcttgtggccttcgttggaaacggcatttcttcatattctgctagacagaagaattctcagtaacttccttgtattgtgtgtattcaactcacagagttgaacgatcctttacacagagcagacttgaaacactctttttgaggaatttgcaagtggagatttcagccgctttgaagtcaatggtagaaaaggaaatatcttcgtataaaaactagacagaatgattctcagaaactcatttgtgatgtgtgcgttcaactcacagagtttaacctttcttttcatagagcagttaggaaacactctgtttgtaaagtctgcaagtggatattcagacctttttgaggccttcgttggaaacgggatttcttcatatgatgctacacagaagaattctcagtaacttccttgtgctgtgtgtattcaactgacagagttgaactttcatttagacagagcagatttgaaacactctttttgtggaatttgcaagtggagattttaagcgctttgaggccaaaggcagaaaaggaaatatcttcgtataaaaactagacagaatcattctcagaaactgctctgcgatgtgtgcgttcaactctcagagtttaacttttcttttcattcagcagtttgaaaacactctgtttgtaaagtctgcacgtggatattttgaccacttagaggccttcgttggaaacgggtttttttgcctgtaaggctagacagaagaattcccagtaatttccttgtgttgtgtgcattcaactcacagagttgaacgttcccttagacagagcagatttgaaacactctatttgtgcaatttgcaagtgtagatttcaagcgctttaaggtcaatggcagaaaaggaaatatcttcatttcaaaactagacagaatcattcccacaaactgcattgtgatgggttcgttcaactcacagagtttaacctttctgttcatagagcagttaggaaacactctgtttgtaaagtctgtaagttgatattcagacctctttgaggccttcgttggaaatggatttcttcatattctgttagacagaagaattctcagaaacttcgttgtgttgtgtgttttcaactcacagagttcaacgatcctttacacagagtagacttgaaacactctttttgtggaattggcagggtggagatttcagccgctttgaggtcaatggaagaaaaggaaatatcttcgtataaaaactagacagagtgattctcagaaactcctttgtgatgtctgtgttcaactcacagagtttaacctttcttttcatagagcagttaggaaacactctgtttgtaaagtctgcaagtggatattcagacctccttgaggccttcgttggaaacgggatttcttcatattctgctatacagaagaattcccagtaacttccttgtgttgtgtgtgttcaactcacagagttgaactttcatttacacagagcagatttgaaacactctttttgtggaatttgcaaatggagatttcaagcgctttgaggccaaaggcagaaaaggaaatatcttcgtagaaaaactagacagaatcattctcagaaactgctgcgtgatgtgtgcgttcaactctcagagtttaacttttcttttcatttagcggtttggaaacactctgtttgtaaagtctgcacgtggatattttgaccacttagaggccttcgttggaaacgggttttttttcatgtaaggctagacagaagaattcccagtaacttccttgtgttgtgtgcattcaactcacagagttgaacgttcccttagacagagcagatttgaaacactctatttgtgcaatttgcaagtgtagatttcaagtgctttcaggtcaatggcagaaaaggaaatatcttcgtttcaaaactagacagaatcattcccacaaactgcgttgtgaggtgttcgttcaactcacagagtttaaactttcttttcatagagcagttaggaaacagtctgtttgtaaattctgtacgtggatattctgacatcttgtggccttcgttggaaacgggatttcttcatattctgctagacagaagaattctcagtaacttccttgtgttgtgtgtattcaactcacagagttgaacgatcgtttacacagagcagacttgaaacactccttttgtggaatttgcaagtggagatttcagccgcgttgaggtcaatggtagaaaaggaaatatcttcgtataaaaactagacagaatgattctcagaaactcctttgtgatgtgtgcgttcaactcacagagtttaacctttcttttcatagagcagttaggaaacactctgtttgtaaagtctgcaagtggatattcagacctgtttgaggccttcgttggaaacgggtttttttcatataaggctagacagaattctcagtaacttccttgtgttgtgtgtgttcaactcacagagttgaactttcatttacacagagcagatttgaaacactctttttgtggaatttgcaagtggagatttcaagcgctttgaggccaaaggcagaaagggaaatatcttcgtataaaaactagacagaatcattctcagaaactgctctgcgatgtgtgcgttcaactctcagagtttaacttttcttttccttcagcagtttggaaacactctgtttgtaaagtctgcacgtggataatttggccacttagaggccttcgttggaaacgggttttttcatgtaaggctagacagaagaattcacagtaacttccttgtgttgtgtgcattcaactcacatagttgaacgttcccttagacagagcagatttgaaacactctatttgtgcaattcgcaactgtagatttcaagcgctttaagatcaatggcagaaaaggaaatatcttcgtttcaaaactagacagaatcattcccacaaactgcgttgtgatgtgttcgttcaactcacagagtttaacctttgtgttcatagagcagttaggaaacactctgtttgtaaagtctgtaagtggatattctgacatcttgtggccttcgttggaaacgggatttcttcatattctgctagacagaataattctcagtaacttccttgtgttgtgtgtattcaactcacagagttgaacgatcctttacagagaggagacttgaaacactctttttgtggaatttgcaagtggagatttcagccgctttgaggtcaatggtagaataggaaatatcttcctatagaaactagacagaataattctcagaaactcctttgtgatgtgtgtgtccaactcacagagtttaacctttcttttcatagagcagttaggaaacactctgtttgtaaagtctgcaagaggatattcagacctctttgaggccttcgttggaaacgggtttttttcatataaggctagacagaataattctcagtaacttccttgtgttgtgtgtattcaactcacagagttgaaggatcctttacagagagcaggcttgaaacacgctttttgtcgaatttgcaagtggagatttcagccgctttgaggtcaatggtagaataggaaatatcttcttatagaaactagacagaatcattctcagaaactgctctgcgatgtgtgcgttcaactctcagagtttaacttttcttttcattcagcagtgtggaaacactctgtttgtaaagtctgcacgtggatattttgaccgcttagaggccttcgttggaaacgggtttttttcctgtaaggctagacagaagaattcccagtaacttccttgtgttgtgtacattcaactcacagagttgaacgttcccttagacagagcagatttgaaacactctttttgtgcaattggcaaatggagatttcaagcgctttaaggtcaatggcagaaaaggaaatatcttcgtttcaaaacgagacagaatcattcccacaaactgcgttgtgatgtgttcgttcaactcacagagtttaacctttctgttcatagagcagttaggaaacactctgtttgtaaagtctgcaagtggatattcagacctccttgaggtcttcgttggaaacgggatttcttcatattctgctagacagaagaattctcagtaacttccttgtgttgtgtgtattcacctcacagagttgaacgatcctttacacagagcagacttgtaacactctttttgtggaatttgcaagtggtgatttcagccgctttgaagtcaaaggtagaaaaggaaatatcttcctataaaaactagacagagtgattctcagaaactcctttgtgatgtctgcgttcaactcacagagtttaaactttcttttcacagagcagttaggaaacactctgtttgtaaagtctgcaagtggatattcagacctccttgaggccttcgttggaaacgggatttcttcatattctgctatacagaagaattcccagtaacttccttgtgttgtgtgtgttcaactcacagagctgaactttcatttacacagagcagatttgaaacactctttttgtggaatttgcaaatggagatttcaagcgctttgaggccaaaggcagaaaaggaaatatcttcgtttcaaaactagacagaatcattctcagaaactgctgcgtgatgtgtgcgttcaactctcagagtttaacttttcttttcattcagcggtttggaaacactgtgtttgtaaagtctgcacgtggatattttgaccacttagaggccttcgttggaaacgggttgttttcatgtaaggctagacagaagaattcccagtaacttccttgtgttgtgtgcattcaactcacagagttgaacgttcccttagacagagcagatttgaaacactctatttgtgcaatttgcaagtgtagatttcaagcgctttaaggtcaatggcagaaaaggaaatatcttcgtttcaaaactagacagaatgattctcagaaacttctttgtgatgtgtgcgttcaactcacagagtttaacctttcttttcatagagcagttaggaaacactctgtttgtaaagtctgcaagtggatattcagacctcttagaggccttcgttggaaacggtatttcttcatactctagacagaagaattctcagtaacttccttgtgttgtgtgctttcaactcacagagttgaacgatcctttacacagagcagattagaaacactctttttgtggaatttgcaagtggagatttcagccgctttgaggtcaatggtagaaaaggaaatatcttcgtatagaaactagacagaatgattctcagaaactcctttgtgatgtgtgcgttcaactcacagagtttaacctttcttttcatagagcagttaggaaacactctgtttgtaatgtctgcaagtggatattcagacatccttgaggctttcgttggaaacgggatttcttcatattctgctagaaagaagaattctcagtaacttccttgtattgtgtgtattcaactgacagagttgaactttcatgtagagagagcagatttgaaacactgtttttgtggaatttgcaagtggagatttcaagcgctttggggccaaaggcagaaaaggaaatatcttcgtataaaactagacagaatcattctcagaaactgctgtgtgatgtgtgcgttcaactctcagagtttaacttttcttttcattcagcggtttggaaacactctgtttgtaaagtttgcacgtggaaattttgaccacttagaggccttcgttggaaacgggtttttttcatgtaaggctcgacagaagaattcccagtaacttccttgtgttgtgtgcattcaactcacagagttgaacgttcccttagacagagcagatttgaaacactctatttgtgcaatttgcaagtgtagatttcaagcgctttaaggtcaatgacagaaaaggaaatattcttcgtttcaaaactagacagaatcattcccacaaactgcgttgtgatgtgatcgttcaactcacagagtttaacctttctgttcatagagcagttaggaaacactctgtttgtaaagtctgtaagtggatattctgacatcttgtggccttcgttggaaacgggatttcttcatattctgctggacagaagaattctcagtaacttccttgtgttgtgtgtattcaactcacagacttgaacgatcctttacagagagcagacttgaaacactctttttgtggaatttgcaagtggagatttcagccgctttgagctcaatggtagaataggaaatatcttcctatagaaactagacagaatgattctcagaaactcctttgtgatgtgtgcgttcaactcacagagtttaacctttcttttcatagagcagttaggaaactctctgcttgtaaagtctgcaagtggatattcagccctctttgaggccttcgttggaaacgggtttttttcatatagggctagacagaagaattcccagtaacttccttgtgttgtgtgtgttcaactcacagagttgaactttgatttacacagagcagattcgaaacactctttttgtggaatttgcaagtggagatttcaagcgctttgaggccaaaggcagaaaaggaaatattcttcgtataaaaactagacagaatcattctcagaaaccgctctgtgatgtgtgcgttcaactctcagagtttaacttttcttttcattcagcagtttggaaacactctgtttgtaaagtctccacgtggatattttgaccacttagaagccttcgttggaaacgtgttttttttcatgtaaggctagacagaagaattcccagtaacttccttttgttgtgtgcattcaactcacagagatgaacgttcccttcgacagagcagatttgaaacactctatttgtgcaatttgcaagtgtagatttaaagcgctttaaggtcaatggcagaaaaggaaatatcttcgtttcaaaactagacagaatcattcccacaaactgcgttgtgatgtgttcgttcaactcacagagtttaacctttctgttcatagagcagtgaggaaacactctgtttgtaaagtctgtaagtggatattctgacatcttgtggccttcgttggaaacgggatttcttcatattctgctagacagaagaattctcagtaacttctttgtgttgtgtgtattcaactcacagagttgaacgatcctttatacagagcagacttgaaacactctttttgtggaatttgcaagtggagatttcagccgctttgaggtcaatggtagaacaggaaatatcttcctatagaaactagacagaatgattctcagaaactcctttgtgatgtgtgcattcaactcacagagtttaacctttcttttcatagagcagttaggaaacactctgtttgtaaagtctgcaagtggatattcagaactccttgaggacttcgttggaaacgggatttctacatattatgctagacagaagaattctcagaaacttccttgggttgtgtgtattcaactcacagagttgaacgatcgtttacacagagcagacttgaaacactctttttgtggaatttgcaagtggagatttcagccgctttgaggtcaatggtagaaaaggaaatatctttgtataaaaactagacagaatgattctcagaaactcctttgtgatgtgtgcgttcaactcacagagtttaacctttcttttcatagagcagttaggaaacactctgcttgtaaagtcttcaagtggatattcagccctctttgaggccttcgttggaaacgggtttttttcatataaggctagacagaagaattcccagtaacttccttgtgttgtgtgtgttcaactcacagagttgaacttccatttacacagagcagatttgaaacactctttttgtggaatttgcaagtggagatttcaagcgctttgaggccaaaggcagaaaaggaaatatctttcgtttcaaaactagacagaatcattctcagaaactgttctgtgatgtgtgcgttcaactctcagagtttaacttttcttttcattcagcagtttggaaacactctgtttgtaaagtctgcacgtggataatttgaccacttagaggccttcgttggaaacgggtttttttcatgtaaggctagacagaagaattcccggtaacttccttgtgttgtgtgtattcaactcacagagttgaacgttcagttagacagagcagatttgaaacactctttttgtgcaatttggaagtggagatttcagccactttgaggtcaatggcaggaaaggaaatatcttcttttcaaaactatacagaatgtttctcagtaagttctttgtgatgtgtgcgttcaactcacagggtttaacctttcttttcatagagcagttagaaagcactctgtttgtaaagtcttcaagtggatattcagacctcttttaggccctcgttggaaacgagatttcttcatattatgctagacagaagaattctcagtaacttccttgtgttgtgtgtattcaacacacagagttgaacgatcctttacacagagcagacttgaaacactctttttgtggaatttgcaagtggagatttcagccgctttgaggtcaatggtagaaaaggaagtatcttcgtataaaaaccagacagaatgattctcagaaactcctttgtgatgtgtgcgttcaactcacagagtttaacctttcttttcatagagcagttagaaaacactctgtttgtaaagtctgcaagtggatattcagacctctttgaggccttcgttagaaacgggatttcttcatattctgctagacagaagaattcccagtaacttccttgtgttgtgtgtgttcaactcacagagttgaactttcatttacacagagcagatttgaaacactctttttgtgaaatttgcaagtggagatttcaagcgctttgaggccaaaggcagaaaaggaaatatcttcgtttcaaaactagacagaatcattctcagaaactgctgtgtgatgtgtgcagttcaactctcagagtttaacttttcttttcattcagcggtttggaaacactctgtttgtaaagtctgcacgtggatattttgaccacttagaggccttcgttggaaacgggattttttcatgtaaggctagacagaagaattcccagtaacttccttgtgttgtgtgcattcaactcacagagacgaacgttcccttagacagagcagatttgaaacactctattggtgtaatttgcaagtgtagatttcaagcgctttaaggtcaatggcagaaaaggaaatatctccgtttcaaaactagacagaatgattctgagaaactcctttgtgatgtgtgcgtacaactcacagagtttaacctttcttttcatagagcagataggaaacactctgtttgtaaagtctgcaagtggatattcagacctccttgaggccttcgttggaaacggcttttcttcctattatgctagacagaagaattctcagtaacttccttgtgttgtgtgtattcaactcacagagttgaatgatcctttacacagagcagacttgaaacactctttttgtggaatttgcaagtggagatttcagccgctttgagttcaatggtagaataggaaaaatcttcctatagaaactagacagaatgattctcagaaacttctttgtgatgtgtgcgttcaactcaccgagtttaacctttcttttcatagatcagttaggaaacactctgtttgtaaactctgcaagtggatattcagacctcttggaggccttcgttggaaacgggatttcttcatactatgctagacagaagaattctcagaaacttccttgtgttgtgtgtattcaactcacagagttgaacgatcctttacacagagcagacttgaaacactctttttgtggaatttgcaagtggagatttcagccgctttgtggtcaatggtagaaaaggaaatatcttcgtatagaaactagacagaatgattctcagaaactcctttgtgatgtgggcgttgaactcacagagtttaacctttcttttcatagagcagttaggaaacactctgtttgtaaagtctgcacatggatattttgaccacttagaggccttcgttggaaacgtgtttttttcatgtaaggctagacagaagaattcccagtaatttccttgtgttgtgtgcagtcaactcacagagttcaacgttcccttagacagagcagatttgaaacactctatttgtgcaatttgcaagtgtagatttcaagcgctttaaggtcaatggcagaaaaggaaatatcttcgtttcaaaactagacagaatcattcccacaaactgcgttgtgatgtgttcgttcaactcacagagtttaacctttcttttcatagagcagttaggaaacactctgttgtaaattctgtaagtggatattctgacatcttggggccttcgttggaaacgggatttcttcatattctgctagacagaataattctcagtaacttccttgtgttgtgtgtattcaactcacagatttgaacgatcctttacagagagcagacttgaaacactctttttgtggaatttgcaagtggagatttcagccgctttgaggtcaatgttagaaaaggaaatatcttcgtataaagactagacagaatgattctcagtaaactcctttgtgatgtgtgtgttcaactcacagtattttaacctttcttttcatagagcagttaggaaacactctgtttgtaaagtctgcaagtggatactcatacctctttgaggccttcgttggaaacgggtttttttcatataaggctagacagaagaattctcagtaacttccttgtgttgtgtgtattcaactgacagagttgaactttcattaagagagagcagatttgaaacactgtttttgtggaatttgcaagtggagatttcaagcgctttggggccaaagcagaaaaggaaatatcttcgtataaaaactagacagaatcgttctcagaaactgctctgcgatgtgtgcgttcaactctcagagtttaacttttcttttcattcagcagtttggaaacactctgtttgtaaagtctgcacgtggataatttgaccacttagaggccttcgttggaaacaggtttttttcatgtaaggctagacagaagaattcccagtaacttccttgtgttgtgtgcattcaactcacagagttgaacgttcccttagacagagcagatttgaaacactctatttgtgcaatttgcaagtgtagatttcaagcgcattaaggtcaatggcagaaaaggaaatatcttcgtttcaaaattagacagaatcattcccacaaactgcgttgtgatgtgttcgttcaactcacagagtttaacctttctgttcatagagcagttaggaaacactctgtttgtaaagtctgcaagtggatattcagacctccttgaggccttcgttggaagcgggatttcttcatattctgctagacagaagaattcccagtaacttccttgtgttgtgtgtgttcaactcacagagttgaactttcatttacacagagcagatttgaaacactctttttgtggaatttgcaaatggagttttcagccgcgttgaggtcaatggtagaaaaggaaatatcttcgtttcaaaactagacagaatgattctcagaaactcctttgtgatgtgtctgttcaactcacagagtttaacatttcttttcatagagcagttaggaaacactctgtttgtaaagtctgcaagtggatattcagacctctttgaggccttcgttggaaacgggtttttttcatataaggctagacagaagaattctcagtaacttccttgtgttgtgtgtattcaactgacagagatgaactttcatttagagagagcagatttgaaacactgtttttgtggaatttgcaagtggtgatttcaagcgctttggggccaaaggcagaaaaggaaatatcttcgtataaaaactagacagaatcattctaagaaactgctctgcgatgtgtgtgttcaactctcagagtttaacttttcttttccttcagcagtttggaaacactctgtttgtaaagtctgcacgtggataatttgaccacttagaggccttcgttagaaacgggtttttttcatgtaaggctagacagaagaattcccggtaacttctttgtgttgtgtgcattcaactcacagagttgaacgttcctttagacagagcagatttgaaacactctttttgtgcaatttgcaagtggagatttcaagcgctttaaggtcaatggcagaaaaggaaataacttcgtttcaaaactagacagtatcattcccacaaactgcgttgtgatgtgttcgctcaactcacagagtttaacctttcttttcatagagcagttaggaaacagtctgtttgtaaattctgtaagtggatattctgacatcttgtggccttcgttggaaacgggatttcttcatattctgctagacagaagaattctcagtaacttcccttgtgttgtgtgtattcaactcacagagttgaacgatcctttacagagagcagacttgaaacactctttttgtggaatttgcaagtggagatttcagccgctttgaggtcaatggtagaaaaggaaatatcttcctataaagactagacagaatgattctcagaaactcctttgtgatgtgtgcgttcaactcacagagttcaacctttcttttcatagagcagttgggaaacgctctgtttgtaaagtctgcaaatggatattcagacttctttgaggccttcgttggaagcaggatttcttcatattctgctagacagaagaattctcagtaacttccttgttttgtgtgtattcaactgacagagttgaactttcgtttagagagagcagatttgaaacactgtttttgtggaatttgcaagtggagatttcaagcgctttggggccaaaggcagaaaaggaaatatcttcgtataaaaactagacagaatcattctcagaaaatgctttgtgatgtgtgcgttcaactctcagagtttaacttttgttttcattcagcagtttggaaacactctgtttgtaaagtctgcacgtggatattttgaccacttagaggccttcgttggaaacgggtttttttcatgtaagggtagacagaagaattcccagtaacttccttgtgttgtgtgcattcaactcacagagttgaacattcccttagacagagcagatttgaaacacactatttgtgcaatttgcaagtgtagatttcaagcgctttaaggtcaatggcagaaaaggaaatatcttcgtttcaaaactagacagaatgattctcagaaactcctttgtgatgtgtgcgttcaactcacatagttgaacctttcttttcatagagcagttaggaaacactctgtttgtaaagtctgtaagtggatattcagacatctttgaggctttcgttggaaacgggatttcttcatattctgctatacagaagaattctcagtaacttccttgtgttgtgtttattcaactcacaggagttgaatgatcctttacacagcagcagacttgaaacactctttttgtggaatttgcaagtggagatttcagccgctttgtggtcaatggtagaaaaggaaatatcttcgtataaagactagacagaatgattctcagaaactcctttgtgatgtgtgcgttcaactcacagagtttaacctttcttttcatagagcagttaggaaacactctgtttgtaaagtctgcaagtggatattcagacctctttgaggccttcgttggaaacgggatttcttcatattctgctggacagaagaattctcagtaactttccttgtgttgtgtgtattcaactcacagagttgaacgatcctttacacagagcagacttcaaacactctttttgtggaatttgcaagtggagatttcagccgctttgaggtcaatagtagaaaaggaaatatcttcgtagaaaaactaggcagaaatcattctcagaaactgctctgcgatgtgtgcgttcaactctcaggagtttaacttttcttttcattcagcagtttggaaacactctgtttgtaaagtctgcacgtggatattttgaccacttagaggccttcgttggaaacgggtttttttcctgtaaggctagacagaagaattcccagtaacttccttgtgttgtgtacattcatctcacagagttgaacgttcccttagacagagcagatttgaaacactctttttgtgcaattggcaaatggagatttcaagcgctttaaggtcaatggcagaaaaggaaatatcttcgtttcaaaactagacagaatcattcccacaaactgcgttgtgatgtgttcgttcaactaacagagtttaacctttcttttcatagagcagttaggaaacagtctgtttgtaaattctgtatgtggatattctgacatcttgtggccttcgttggaaacgggatttcttcatattctgcttgacagaagaattctcagaatcttccttgtgttgtgtgtattcaactcacagagttgaatgatggtttacacagagcagatttgaaacactcatttggtggaatttgcaagtggagatttcagccgctttgaggtcaatggtagaaaaagaaatatcttcgtataacaactagacagaatgattctcagaaactcctttgtgatgtgtgcgttcaactcacagagtttaacctttcttttcatagagcagttaggaaacactctttctgaaaagtctgcaagtggatattcagacctctttgaggccttcgttggaaacgggatttcttcatattctgctagacagaggaattcccagtaacttccttgtgttgtgtgtgttcaactcacagagttgaactttcatttacacagagcagatttgaaacactctttttgtggaatttgcaagtggagatttcaagcgctttgaggccaaaggcagaaaaggaaatatcttcgtttcaaaactagacagaatcattctcagaaactgctgcatgatgtgtgcgttcaactctcagagtttaacttttcttttcattcagcggtttggaaacactctgtttgtaaagtctgcacgtggatattttgaccacttagaggccttcgttggaaacaggttttttgcatgtaaggctagacagaagaatttccagtaaattccttgtgttgtgtacattcaactcacagagttgaacgttcccttagacagagcagatttgaaacactctttttgtgcaattggcaagtggagatttcaagcgctttaaggtcaatggcagaaaaggaaatatcttcgtttcaaaactagacagaatcattcccacaaactgcgttgtgatgtgttcgttcaactcacagagtttaacctttctgttcatagagcagttaggaaacactctgtttgtaaagtctgcaagtggatattcagacctctttgaggccttcgttggaaacgggatttcttcatattctgctagacagaagaattctcagaatcttccttgtgttgtgtgtattcaactcacagagttgaacgatcctttacacagagcagacttgatgcactctttttgtggaatttgcaagtggagatttcagccgctttgaggtccatggtagaaaaggaaatatcttcgtataaaaactagacagaatgattctcagaaacttctttgtgatgtgtgcgttcaactaacagagtttaacatttcttttcatagagcagttaggaaacactctgtttgtaaactctgcaagtggatattcagacctctttgaggccttcgttggaaacgggatttcttcatactgtgctagacagaaggattcccagtaacttccttgtgttgtgtgtgttcaactcacagagttgaactttcatttacaatgagcagatttgaaacactctttttgtggaatttgcaagtggagatttcaagcgctttgaggccaaaggcagaaaaggaaatatcttcgtataaaaactagacagaatcattctcagaaactgctctgcgatgtgtgcgttcaactctcagagtttaacttttcttttcattcagcagtttggaaacactctgtttgtaaagtctgcacgtgcataatttgaccacttagaggccttcgttggaaacaggtttttttcatgtaaggctagacagaagattcccagtaacttccttgtgttgtgtacattcaactcacagagttgaacgttcccttagacagagcagatttgaaacactctttttgtgcaattggcaaatggagatttcaagcgctttaaggtcaatggcagaaaaggaaatatcttcgtttcaaaactagacagaatcattcccacaaactgcgttgtgatgtgttcgttcaactcacagggtttaacctttctattcatagagcagttaggaaacactctgtttgtaaagtctgtaagtggatattctgacatcttgtggccttcgttggaaacgggatttcttcacattctgctagacagaagaattctcagtaacttccttgtgttgtgtttattcaactcacagagttgaatgatcctttacacagagcagacttgaaacactgtttttgtggaatttgcaagtggagatttcagccgctttgaagtcaatggtagaaaagtaaatatcttcgtataaagactagacagaatgattctcagaaacttcattgtgatgtgtgcgttcaactcacagagtttaacctttcttttcatagagcagttaggaaacactctgtttgtaaactctgcaagtggatattcagacctctttgaggccttcgttggaaacgggttttttcatgtaaggctagacagaagaattcccagtaacttccttgtgttgtgtgtgttcaactcacagagttgaactttcagttacacagagcagatttgaaacactctttttgtggactttgcaaatggagatttcaagcgctttgaggccaaaggcagaaatggaaatatcttcgtataaaaactagacagaatcattctcagaaactgctctgcgatgtgtgcgttcaactctcagagtttaacttttcttttcattcagcagtttggaaacactctgtttgtaaagtctgcacgtggataacttgaccacttagaggccttcgttggaaacgggtttttttcctgtaaggctagacagaagaattcccagtaacttccttgtgttgtgtgcattcaactcacagagttgaacgttcccttagacagagcagatttgaaacactctatttctgcaatttgcaagtgtagttttcaagcactttaaggtcaacggcagaaaaggaaatatcttcgtttcaaaactagacagaatcattcccacaaactgcgttgtgatgtgctcgttcatctcacagagtttaacctttcttttcatagagcagtttggaaacagtctgtttgtaaattctgtaagtggatattctgacatcttgtggccttcgttggaaacgggatttcttcatattctgctagacagaagaattctcagtaacttccttgtgttgtgtgtattcaactcacagagttcaacgatcctttacacagagcagacttgaaacactctttttgtggaatttgcaagtggagatttcagccgctttgaggtcaatggtagaaaaggaaatatcttcgtataaaaactagacagaatgattctcagaaactcctttgtgatgtgtgcgttcaactcacagagtttaacctttcttttcatagagcagttgggaaacactctgtttgtaaagtctgcaagtggatattcagacttcctttgaggccttcgttggaagcgggatttcttcatgttctgctagacagaagaattcccagtaacttccttctgttgtgtgtgttcaactcacagagttgaactttcatttacacagagcagatttgaaaaactctttttgtggaatttgcaagtggagatttcaagcgctttgaggccaaaggcagaaaaggaaatatcttcgtataaaaactagacagaatcattcttagaaactgctctgcgatgtgtgtgttcaactctcagagtttaacttttcttttcattcagcagtttggaaacactctgtttgtaaagtctgcacgtggatattttcaccacttagaggccttcgttggaaacgggtttttttcctgtaaggctagacagaagaattcccagtaacttccttgtgttgtgtgcattcaactcacaaagttgaacgttcccttagacagagcagatttgaaacactctatttgtgcaatttgcaagtgtagatttcaagcgctttaaggtcaacggcagaaaaggaaatatcttcgtttcaaaactagacagaatcattcccacaaactgcgttgtgatgtgctcgttcaactcacagagtttaacctttcttttcatagagtagttaggaaacagtctgtttgaaaattctgtaagtggatattctgacatcttgtggccttcgttggaaacgggatttcttcatattctgctagacagaagaattctcagtaacttcccttgtgttgtgtgtattcaactcacagagttgaacgatcctttacacagagcagacttgaaacactctttttgtggaatttgcaagaggagatttcagccgctttgaggtcaatagtagaaaaggaaatatcttcgtagaaaaactagacagaatgattctcagaaactcctttgtgatgtgtgcgttcaactcacagagtttaacctttcttttcatagagcagttaggaaacactctgtttgtaaagtctgcaagtggatattcagacctctttgaggccttcgttggaaacgggtttttgtcatataaggctagacagaagaattctcagtaacttccttgtgttgtgtgtattcaactgacagggttgaactttcatttagagagagcagatttgaaacactgtttttgtggaatttgcaagtggagatttcaggcgccttggggccaaaggcagaaaaggaaatatcttggtataaaaactagacagaatcattctcagaaactgctgcgtgatgtgtgcgttcaactctcagagtttaacttttcttttcattcagcggtttggaaacactctgtttgtaaagactgcacgtggatattttgaccacttagaggccttcgttggaaacgggttttcttcatgtaaggctagacagaagaattctcagtaacttccttgtgttgtgtttattcaactcacagagttgaatgatcctttacacagagcagacttgaaacactctttttgtggaatttgtaagtggagatttcagccgctttgaagtcaatggtagaaaagtaaatatcttcgtataaagactggacagaatgattctcagaaactcctttgtgatgtgtgcgttcaactcacagagtttaacctttctgttcatagagcagttaggaaacactctgtttgtaaagtctgtaagtggatattctgacatcttgtggccttcgttggaaacgggatttcttcatattctgctagacagaataattctcagtaacttccttgtgttgtgtgtattcaactcacagagttgaacgatcctttacagagagcagacttgaaacactctttttgtggaatttgcaagtggagatttcagccgctttgaggtcaaaggtagaataggaaatatcttcctatagaaactagacagaatgattctcataaactcctttgtgatgtgtgcgttcaactcacagagtttaacctttcttttcatagagcagttaggaaacactctgtttgtaaagtctgcaagtggatattcagacctctttgaggccttcgttggaaacgggatttcttcatattctgctagacggaagaattctcagtaacttccttgtgttgtgtgtattcaactgactgaattgaactttcatttagagagagcagatttgaaacactgtttttgtggaatttgcaagtggagatttcaagcgctttggggccaaaggcagaaaaggaaatatcttcgtataaaaactagacagaatcattctcagaaactgctctgcgatgtgtgcgttcaactctcagagtttaacttttcttttcattcagcagtttggaaacactctgtttgtaaagtctgcacgtggataatttgaccacttagaggccttcgttagaaacgggtttttttcatgtaaggctagacagaagaattcccagtaacttccttgtgttgtgtgcattcaactcacagagttgaacgttcccttagacagagcatatttgaaacactctatttgtgcaatttgcaagtgtagatttcaagcgctttaaggtcaatggcagaaaaggaaatatcttcgtttcaaaactagacagaatcattcccacaaactgcgttgtgatgtgttcgctcaactcgcagagtttaacgtttcttttcatagagcagttaggaaacagtctgtttgtaaattctgtaagtggatattctgacatcttgtggccttagttggaaacgggatttcttcatattctgctagacagaagaattctcagaaacttccttgtgttgtgtgtattcaactcacagagttgaacgatcctttacacagagcagacttgaaacacactttttttggtattttcaagtggagatttcagccaatttgaggtaaatggtagaaaaggaaatatcttcgtataaaaactagacagagtgattctcagaaactcctttgtgatgtctgcgttcaactcacagagtttaacctttcttttcatagagcagttaggaaacactctgtttgtaaagtctgcaggtggatattcagacctccttgaggccttcgttggaaacgggatttcttcatattctgctatacagaagaattcccagtaacttccttgttttgtgtgtgttcaactcacagagttgaactttcatttacacagagcagatttgaaacactctttttgtggaatttgcaaatggagatttcaagcgctttgaggccaaaggcagaaaaggaaatatcttcgtataaaaactagacagaatcattctcagaaactgctctgcgatgtgtgcgttcaactctcagagtttaactttgcttttcattcagcagtttggaaacactctgtttgtaaaatctgcacgtggataatttgaccacttagaggccttcgttggaaacgggtttttttcatgtaaggctagacagaagaattcccagtaacttccttctgttgcgtacattcagctcacagagttgaacgttcccttagacagagcagatttgaaacactctttttgtgcaattggcaagtggagatttcaagcgctttaaggtcagtggcagaaaaggaaatatcttcgtttcaaaactagacagaatgattctcataaactcctttgtgatgtgtgcgttcaactcacagagtttaacctttcttttcatagagcagttaggaaacactctgcttgtaaagtctgcaagtggatattcagacctccttgaggccttcgttggaaacgggatttcttcatattctgctagacagaagaattctcagtaacttccttgtgttgtgtgtattcaactcacagagttgaacgatcctttacacagagcagacttgaaaccctctttttgtggaatttgcaagtggagatttcagccgctttgaggtcaatggtagaaaaggaaactatcttcgtataaagactagacagagtgattctcagaaactcctttgtgatgtctgcgttcaactcacagagcttaacctttcttttcatagagcagttaagaaacactctgtttgtaaagtctgcaagtggatattcagacctccttgaggccttcgttggaaacgggatttcttcatattctgctatacagaagaattctcagaaacttccttgtgttgtgtgttttcaactcacagagttcaacgatcctttacacagagtagacttgaaacactctttttgtggaattggcagggtggagatttcagccgctttgaggtcaatggtagaaaaggaaatatcttcgtataaaaactagacagaatgattctcagaaactcctttgtgatgtgtgcgttcaactcgcatagtttaacctttcttttcatagagcagttaggaaacactctgtttgtaatgtctgcacgtggatatttggacttctttgaggccttcgttggaaacgggttttttccatgtaaggctagacagaagaattcccagtaacttccttgtgttgtgtacattcaactcacagagttgaacgttcccttagacagagcagatttgaaacactctttttgtgcaattggcaagtggagatttcaagcgctttaaggtcaatggcagaaaacgaaatatcttcgtttcaaaactacacagaatcattcccacaaacggcgttgtgatgtgttcgttcaactcacagagtttaacctttctgttcatagagcagttaggaaacactgtttgtaaagtctgtaagtggatattctgacatcgtgtggccttcgttggaaacgggatttcttcatattctgctagacagaataattctcagtaacttccttgtgttgtgtgtattcaactcacagagttgaacgatcctttacacagagcagacttgaaacattctttttgtggaatttgcaactggagatttcagccgctttgaggtcaattgtagaataggaaatatcttcctatagaaactagacagaatgattctaagaaactcctttgtgatgtgtgtgttcaactcacagagattaacctttcttttcatagagcagttagtaaacactctgtttataaagtctgcaagtggatattcagacccctttgaggccttcgttggaaacgggatttcttcatattatgctagacagaagaattctcagtaacttccttgtgttgtgtgtattcaactgacagagttgaactttcatttagagagagcagatttgaaacactgtttttgtggaatttgcaagtggagatttcaagcgctttggggccaaaggcagaaaaggaaatatcttcgtatgaaaactagacagaatcattctcagaaactgctctgtgatgtgtgcgttccactctcagagtttaacttttcttttcattcagcagtatggaaacactctgtttgtaaagtctgcacgtggatgttttgaccacttagtggccttcgttggaaacgggtttttttcatgtaaggctagacagaagaattctcagtaacttccttgtgttgtgtgtattcaactcacagagttgaatgatcctttacacagagcagacttgtaacactatttttgtggaatttgcaagtggagatttcagccactttgaagtcaaagtagaaaaggaaataacttcctataaaaactagacagaatcattcccacaaactgcgttgtgatgtgtttgttcaactctcagagtttaacctttctgttcatagagcagttaggaaacactctgtttgtaaagtctgcaagtggatattctgacatcttgttgccttcgttggaaacgggatttcttcatattctgctagacagaagaattctcagaatcttccatgtgttgtgtgtattcaactcacagagttgaacgatcctttacacagagcagacttgaaacactctttttgtggaatttgcaagtggagatttcagccgctttgaggtccatggtagaaaaggaaatatcttcgtataaaaactagacagaatgattctcagaaactcctttgtgatgtgtgtctgcaactcacagagtttaacctttcttttcatagagcagttagtaaacactctgtttataaagtctgcaagtggatattcagaccccttttaggccctcgttggaaacgggatttcttcatattctgccagacagaagaattcccagtaacttccttgtgttgtgtgtgttcaactcacagagttgaactttcatttacacagagcagatttgaaacactctttttgtggaatttgcaagtggagatttcaagcgctttgaggccaaatgcagaaaaggaaatatcttcgtttcaaaactagacagaaatcattctcagaaactgctgtgtgatgtgtgcgttcaactctcagagtttaacttttcttttcattcagcggtttggaaacactctgtttgtaaagtctgcacgtggaaattttgaccacttagaggccttcgttggaaacgggtttttttcatgtaaggctcgacagaagaattcccagtaacttccttgtgttgtgtacattcaactcacagagttgaacgttcccttagacagagcagatttgaaacactctttttgtgcaattggcaagtggtgatttcagccgctttgaggtcaatggtagaaaaggaaatatcttcgtataaaaactagacagaatcattcccacaaactgcgttgtgatgtgttcgttcaactcacagagtttaacctttcttttcatagagcagttaggaaacactctgttggtaaattctgtaagtggatattctgacatcttgtggcctccgttggaaacgggatttcttcatattctgctagacagaagaattctcagtaacttccttgtgttgtatgtattcaactcacagagttgaacgatcctttacacagagcagacttgaaacactctttttgtggaatttgcaagtggagatttcagccgctttgaggtcaatggtagaataggaaatatcttcctatagaaactagacagaatgattctcagaaacacctttgtgatgtgtgcgttcaactcacagagtttaacttttcttttcatagagcagttaggaaacactctgtttgtaaagtctgcaagtggatattcagacctctttgaggccttcgttggaaacgggatttcttcatattctgctagacagaagaattctcagtaacttccttgtgttgtgtgtattcaactcacagagttgaatgatcctttacacagaacagacttgaaacactcttgttgtggaatttgcaagtggagaattcaggcgctttgaggtcaacggtagaataggaaatatcttcctatagaaactagacagaatcattctcagaaactgctctgtgatgtgtgcgttcaactctcagagtttaacttttcttttcattcagcagtttggaaacactctgtttgtaaagtctgcacgtggatattttgaccacttagaggccttcgttggaaacgggtttttttcctgtaaggctagacagaagaattctcagtaacttccttgtgttgtgtacattcaactcacagagttgaacgttcccttagacagagcagatttgaaacactctttttgtgcaattggcaaatggagatttcaagcgctttaaggtcaatggcagaaaaggaaatatcttcgtttcaaaactagacagaatgattctcagaaactcctttgtgatgtgtgcgttcaactcacagagtttaacctttcttttcatagagcagttaggaaacactctgtttgtgaagtctgcaagtggatattcagacctctttgaggcctttgttggaaacgggatttcttcatattctgctagacagaagaattctcagaaacttcctggtgttgtgtgttttcaactcacagagttcaacgatcctttacacagagtagacttgaaacactctttttgttgaattggcaagtggagatttcagccgctttgaggtcaatggtagaaaaggaaatatcttcgtataaaaactagacagagtgattctcagaaactcctttgtgatgtctgcgttcaactcacagagtttaacctttcttttcatagagcagttaggaaacactccgtttgtaaagtctgcaagtggatattcagacctccttgaggccttcattggaaaccggatttcttcatattttgctatacagaagaattctcagtaacttccttgtgttgtgtgtattcaactgacagagttgaactttcatttagagagagcagatttgaaacactgtttttgtggaatttgcaaggggagatttcaagcgctttggggccaaaggcagaaaaggaaatatcttcgtataaaaactagacagaatcattctcagaaactgctctgcgatgtgtgcgttcaactctcagagtttaacttctcttttcattcagtagtttggaaaaactctgtttgtaaagtctgcacgtggataacttgaccacttagaggccttcgttggaaacgggtttttttcatgtaaggctagacagaagaattctcagtaacttccttgtgttgtgtgtattcaactgacagagttgaacgatcctttacacagagcatacttgaaacactcttcttgtggaatttgcaagtggagatttcagccgctttgaggtcaatggtagaataggaaatatcttcgtataaaaagtagacagaatgattctcagaaactcctttgtgatgtgtgcgttcaaatcacagagtttaacctttcttttcatagagcagttagggaacactctgtttgtaaagtctgcaagtggatattcagacctccttgaggccttcgttggaaacgggatttcttcatattctgctagacagaagaattctcagtaacttccttgtgttgtgtgtattcaactcacagatttgaacgatcctttacacagagcagacttgaaacactctttttgtggaatttgcaagtggagatttctgacgctttgaggtcaatggtagaataggaaatatcttcctatagaaactagacagaatgattctgagaaactcctttgtgatgtgtgcgttcaactcacagagtttaacctttcttttcatagagcagttaggaaacactctgtttgtaaagtgtgcaagtggatattcagaactccttgaggccttcgttggaaacgggatttcttcatattatgctagacagaagaattcccagtaacttccttctgttgtgtgtgttcaactcacagagttgaactttgatttacacagagcagatttgaaacactctttttgtggaatttgcaagtggagatttcaagcgctttgaggccaaaggcagaaaaggaaatatcttcgtataaaaactagacagaatcattctcagaaactgctctgcgatgtgtgcgttcaactctcagagcttaacttttcttttcattcagcagtttggaaacactctgtttctaaagtctgcacgtggataacttgaccacttagaggccttcgttggaaacgggtttttttcctgtaaggctagacagaagaattcccagtaacttccttgtgttgtgtacattcaacacacagagttgaacgttcccttagacagagcagatttgaaacactcttttagtgcaattggcaactggagatttcaagcgatttaaggtcaatggcagaaaagtaaatatcttcgtttcaaaactagacagaatcattgccacaaactgcgttgtgatgtgttcgttcaacccacagagtttaacctttctgttcatagagcagttaggaaacactctgtttgtaaagtatgaaagtggatattctgacatgttgtggccttcgttggaaacgggatttcttcatattctgctagacagaagaattctcagaaacttccttgtgttgtgtgttttcaactcacagagttgaacgatcctttacacagagcagacttgaaacactctttttgtggaatttgcaagtggagatttcagccgctgtgaggtcaatggtagaataggaaatatcttcctatagaaactagacagaatgattctcagaaactcctttgtgatgtgtgtgttcaactcacagagtttaacctttcttttcatacagcagttaggaaacactctgtttgtaaattctgcaagtggatattttgaccgctttgaggccttcgttggaaacgggtttttttcatgtaaggctagacagaagaattcccagtaacttccttgtgttgtgtgtgttcaactcacagagttgaactttcatttacccagagcagatttgaaacactctttttgtggaatttgcaagtggagatttcaagcactttgaggccaaaggcagaaaaggaaatatcttcgtttcaaaactagacagaatcattctcagaaactgctctgcgatgtgtccgttcaactctcagagtttaacttttcttttcattcagcagtttggaaacactctgtttgtaaagtctgcacgtggatattttgaccacttagaggccttcgttggaaacgggtttttttcctgtaaggctagacagaagaattcccagtaacttccttgtgttgtgtacattcaactcacagagttgaacgttcccttagacagagcagatttgaaacactctttttgtgcaattggcaagtggagatttcaagcgctttgaggtcaatggcagaaaaggaaatatcttcgtttcaaaactagacagaatcattcccacaaactgcgttgtgatgtgttcgttctactcacagagtttaacctttcttttcatagagcagttaggaaacagtctgtttgaaaattctgtaaggggatattctgacatcttgtggccttcgttggaaacgggatttcttcatattctgctagacagaagaactcccagtaacttccttgtgttgtgtgtgttcaactcacagagttgaactttcatttacacagagcagatttgaaacactctttttgtggaatttgcaaatggagatttcagccgcgttgaggtcaatggtagaaaaggaaatattcttcgtttcaaaactagacagaatgattctcagaaactcctttgtgatgtgtgcgttcaactcacagagtttaacctttcttttcatagaccagttaggaaacactctgtttgtaaagtctgcaagtggatattcagacctccttgaggccttcgttggaagcgggatttcttcatgttctgctagacagaagaattctcagaaacttccttgtgttgtgtgttttcaactcacagagttgaacgatcctttacacagagcagacttgaaacactctttttgtggtatttgcaagtggagatttcagccgctttgagttcaatggtagaataggaaatatcttcctatagaaactagacagaatcattcccacaaactgcgttgtgatgtgttcgttcaactcacagagtttaacctttgttttcagagaggagttaggaaactgtctgtttgtaaattctgtaagtggatattctgaaatcttgtggccttcgttggaaacgggatttcttcatattctgctagacagaagaattctcagaatcttccttgtgttgtgtgtattcaactcacagagtttaacgatggtttacacagagcggatttgaaacactctttttgtggaatttgcaagtggagatttcagccgctttgaggtcaatggtagaaaaggaaatatcttcgtataaaaactagacagaatgattctcagaaacttctttgtgatgtgtgcgttcaactcacagagtttaacctttcttttcatagagcagttaggaaacactctgtttgtaaactctgcaagtggatattcagacctctttgaggccttctttggaaacgggatttcttcatactgtgctagacagaagaattctcagtaacttccttgtgttgtgtgtattcatctcacagagttgaacgatcctttacacagagcggacttgaaacactcttttgatggaatttgcaagtggagatttcagccgcgttgaggtcaatggtagaaaaggaaatatcttcgtataaaaactagacagaatgattctcagaaacttctttgtgatgtgtgcgttcaactcacagagtttaacctttcttttcatagagcagttaggaaacactctgtttgtaaactctgcaagtggatattcaaacctctttgaggccttcgttggaaacgggatttcttcatactatgctagacagaagaattcccagtaacttccttgtgttgtgtgtgttcaactcacagagttgaactttcatttacacagagcagatttgcaacactctttttgtggaatttgcaaatggagatttcaagcgctttgaggccaaagccagaaaaggaaatatcttcgtttcaaaactagacagaatcattctcagaaactactgcgtgatgtgtgcgttcaactctcagagtttaacttttcttttcattcagcggtttggaaacactctgtttgtaaagtctgcacgtggatattttgaccacttagaggccttcgttggaaacgggtttttttcatgtaaggctagacagaagaattctcagaaactcccttgtgtggtgtgtattcaactgacagggttgaactttcatttagacagagcagatttgaaaccctctttatgtggaattggcaagtggagatttcaagcgctttgagaccaaaggcagaaaaggaaatatcttcgtttcaaaactagacagaatcattcccacaaactgcgttgtgatgtgttcgttcaactcacagggtttaacctttcttttcatagagcagttaggaaacactctgtttgtaaagtctgtaaggggatattctgacatcttgtggccttcgttagaaacgggatttcttcatattctgctagacacaagaactctcagtaacttccttgtgttgtgtgtattcaactcacagagttgaacgatcctttacacagagcagacttgaaacattcttttcgtggaatttgcaactggagatttcagccgctttgaggtcaatggtagaataggaaatatcttcctatagaaactagacagaacgattctcagaaactcctttgtgatgtgtgcgttcaactcacagagtttaaactttcttttcatagagcagttaggaaacactctgtttgtaaagtctgcaagtggatattcagacctctttgaggccttcgttggaaacgggatttcttcatattctgctagacagaagaattctcagtaacttccttgtgttgtgtgtattcaactgacagagttgaactttcatttagagagagcagatttgaaacactgtttttgtggaatttgcaagtggagatttcaagcgctttgggaccaaaggcagaaaaggaaatatcttcgtataaaaactagacagaatcattctcagaaactgctctgcgatgtgtgcgttcaactctcagagtttaacttttcttttcattcagcagtttggaaacactctggttgtaaagtctgcacttggataacttgaccacttagaggacttcgttggaaacgggtttttttcctgtaaggctagacagaagaattcccagtaacttccttgtgttgtgtgcattcaactcacagacttgaacgttcccttagacagagcagatttgaaacactctatttgtgcaatttgcaagtgtagatttcaagcgctttatggtcaacggcagaaaaggaaatatcttcgtttcaaaactagacagaatgattctcagaaactcctttgtgatgtgtgcgttcaactcacagagtttaacctttcttttcatagagcagttaggaaacactctgtttgtaaagtgtgcaagtggatattcagacctccttgaggccttcgttggaaacgggatttcttcatattatgctagacagaagaattctcagtaagttccttgtgttgtgtgtattcaactcacagagttgaacgatcctttacacagagcagacttgaaacactctttttgtggaatttgcaagtggagatttcagccgctttgaggtcaatggtagaataggaaatatcttcctatagaaactagacagaatgattctcagaaactcctttgtgatgtgtgcgttcaactcacagagtttaacctttctttacatagagcagttaggaaacactcagtttgtaaagtctgcaagaggatattcagacatctttgaggctttcgttggaaacgggatttcttcatattctgctagagagaaagaattcccagtaacttccttgtgttgtgtgtgttcaactcacagagttgaactttcatttacacagagcagattggaaacactctttttgtggaatttgcaagtggagattgcaagcgctttgaggccaaaggcagaaaaggaaatatcttcgtataaaaactagacagaatcattctcagaaactgctctgcgatgtgtgcgttcaactctcagagtttaactttgcttttcattcagcagtttggaaacactctgtttgtaaagtctgcacgtggatattttgaccacttagaggccttcgttggaaacggttttctttcctgtaaggctagacagaagaattcccagtaacttccttgtgttgtgtacattcaactcacagagttgaacgttcccttagacagagcagatttgaaacactctttttgtgcaattggcaagtggagatttcaagcgctttaaggtcaatggcagaaaaggaaatatcttcgtttcaaaactagacagaatcattcccacaaactgcgttgtgatgtgttcgttcaactcacagagtttaacctttctgttcatagagcagttaggaaacactctgtttgtaaagtctgtaagtggatattctgacatcttgtggcctttgttggaaacgggatttcttcatattctgctagacagaagaattctcagtaacttccttgtgttgtgtgtattcaactcatagagttgaacgatcccttacacagagcagacttgtaacactctttttgtggaatttgcaagtggagatttcacccgctttgacgtcaaaggtagaaaaggaaatatcttcctataaaaactagacagaatgattctcagaaactcctttgtgatgtgtgcgttcaactcacagagtttaacttttcttttcatagagcagttaggaaacactctgtttataaagtctgcaagtggatattcagacctctttgaggccttcgttggaaacgggatttcttcatattatgctagacagaagaattcccagtaacttccttgtgttgtgtgtgttcaactcacagagtttaactttcatttacccagagcagatttgaaacactctttttgtggaatttgcaagtggagatttcaagcgctttgaggccaaaggcagaaaaggaaatatcttcgtttcaaaactagacagaatcattctcagaaactgctgcgtgatgtgtgcgttcaactctcagagtttaacttttcttttcattcagcggtttggaaacactctgtttgtaaagtctgcacgtggaaattttgaccacttagaggccttcgttggaaacgggtttttttcatgtaaggccagacagaagaattcccagtaacttccttgtgttgtgtacattcaactcacagagttgaacgttcccttagacagagcagatttgaaacactctttttgtgcaattggcaagtggagatttcaagcgctttaaggtcaaagcagaaaaggaaatatcttcgtttcaaaactagacagaatcattcccacaaactgcgttgtgatgtgttcgttcaactcacagagtttaacctttcttttcatagagcagttaggaaacagtctgtttgtcaattctgtaagtggatattctgacatcttgtggccttcgttggaaaagggatttcttcatattctgctagacagaagaattctcagtaacttccttgtgttgtgggtattcaactcacagagttgaacgatcctttacacagagcagacttggaacactctttttgtggaatttgcaagtggagatttcagccgcgttgaggtcaatggtagaaaaggaaatatcttcgtataaaaactagacagaatgattgtcagaaactccttggtgctgtgtgcgttcaactcacagagtttaaagtttcttttcatagagcagttaggaaacactctgtttgtaatgtctgcaggtggatattcagacatcattgaggctttttttggaaacgggatttcttcatattctgctatatagaagaattctcagtaacttccttgtgttgtgtgtattcaactcacagagttgaacgatcctttacacagagcagacttgaaacactctttttgtggaatttgcaagtggagatttcagccgctttgaggtctatagtagaaaaggaaatatcttcgtagaaaaactagacagaatgattctcagaaactcctttgtgatgtgtgcgttcaactcacagagtttaacctttcttttcatagagcagttaggaaacactctgtttgtaaagtctgcaggtagatattcagacatctttgaggctttcgttggaaacgggatttcttcatattctgctagacagaagaattcccagtaaattccttgtgttgtgtgtgttcaactcacagagttgaactttcatttacacagagcagatttgaaacactctttttgtggaatttgcaagtggagatttcaagcgctttgaggccaaaggcagaaaaggaaatatcttcgtttcaaaactagacagaatcattctcagaaactgctgcgtgatgtgtgcgttcaactctcagagtttaacttttcttttcattcagcggtttggaaacactctgtttgtaaagtctgcacgtggaaattttgaccacttagaggccttcgttggaaacgggtttttttcatgtaaggcttgacagaagaattcccagtaacttccttgtgttgtgtgcattcaactcacagagttgaacgttcccttagacagagcagatttgaaacactctatttgtgcaatttgcaagtgtagatttcaagcgctttaaggtcaacggcagaaaaggaaatatcttcgtttcaaaactagacagaatgattctcagaaacttcattgtgatgtgtgcgttcaactcacagagtttaacctttcttttcatagagcagttgggaaacagtctgtttgtaaattctgtaagtggatattctgacatcttgtggccttcgttggaaacgggatttcttcatattctgctagacagaagaattctcagtaacttccttgtgttgtgtgtattcaactcacagagttgaaagatcctttacacagagcagacttgaaacactctttttgtggaatttgcaagtggagatttcagccgctttgaggtcaatggtagaaaaggaaatatcttcgtataaaaactagacagaatgattctcagaaactcctttgtgatgtgtgcgttcaactcacagagttcaacctttcttttcatagagcagttgggaaacactctgtttgtaaagtctgcaagtggatattcagacctctttgaggccttcgttggaagcgggatttcttcatattctgctagacagaagaattcccaataacttccttgtgttgtgtgtgttcaactcacagagttgaactttcatttacacagagcagattggaaacactctttttgtggaatttgcaagtggagatttcaagtgctttgaggccaaaggcagaaaaggaaatatcttcttataaaaactagacagaatcattctcagaaactgctgcatgatgtgtgcgatcaactctcagagtttaacttttcttttcattcagcggtttggaaacactctgtttgtaaagtctgcacgtggaaattttgacaacttagagaccttcgttggaaacgggattttttcatgtaaggctagacagaagaattctcagtaacttccttgtgttgtgtttattcaactcacagagttgaatgatcctttacacagagcagacttgaaacactctttttgtggaatttgcaagtggagatttcagccgctttgaggtcaatggtagaataggaaatatcttactatagaaactagacagaatgattctcagaaactcctttgtgatgtgtgcattcaactcacagagtttaacctttcttttcatagagcagttaggaaacactctgtttgtaaagtctgcaagtggatattcagacctctttgaggccttcgttggaaacgggttttcttcatattctgctagacagaagaattctcagtaacttccttgtgttgtgtgtattcaactcacagagttgaacgatcctttacacagagcagagttgtaacactctttttgtggaatttgcaagtggagaattcagccgctttgaagtcaaaggtagaaaaggaaatatcttcctataaaaactagacagaatgattctcagaaactcctttgtgatgtgtgcgttcaactcacagagtttaacctttcttttcatagagcagttaggaaacactctgttggtaaagtctgcaagtggatattcagacctccttgaggccttcgttggaaacgggatttcttcatattatgctagacagaactattctcagtaacttccttgtgttgtgtgtattcaactgacagagttgaaatttcatttagagagagcagatttgaaacactgtttttgtggaatttgcaagtggagatttcaagcgctttggggccaaaggcagaaaaggaaatatcttcgtataaaaactagacagaataattctcagaaactgctgcgtgatgcgtgcgttcaactctcagagtttaacttttcttttcattcagcggtttggaaacactctgtttgtaaagtctgcaagtggatattcagacctctttgaggccttcgttggaaacgggatttcttcctattatgctagacagaagaattcccaataacttccttgtgttgtgtacattcaactcacagagttgaacgttcccttagacagagcagatttgaaacactctttttgtgcaattggcaagcggagatttcaagcgctttaaggtcaatggcagaaaaggaaatatcttcgtttcaaaactagacagaatcattcccacaaactgcgttgtgatgtgttcgttcaactcacagagtttaacctttcttttcatagagcagttaggaaacagtctgtttgtcaattctgtaagtggatattctgacatcttgtggccttcgatggaaacgggatttcttcatattctgctagacagaagaattctcagtaacttccttgtgttgtgtgtattcaactcacagagtggaacgatcctttacacagagcagacttgagacactctttttgtggaatttgcaagtggagatttcagccgctttgaggtcaatagtggaaaaggaaatatcttcatagaaaaactagacagaatgattctcagaaactcctttgtgatgtgtgcgttcaacacacagagttaaacttttcttttcatagagcagttaggaaacactctgtttgtaaagtctgcaagtggatattcagacctctttgaggccttcgttggaaacaagatttcttcatattatgctagacagaagaattctcagtaacttccttgtgttgtgtgtattcaactgacagagttgaactttcatttagagagagcagatttgaaacactgtttttgtggaatttgcaagtggagatttcaagcgctttcgggccaaaggcagaaaaggaaatatcttcgtataaaaactagacagaatcattctcagaaactgctgcgtgatgtgtgcgttcaactctcagtgtttaacttttcttttcattcagcggtttggaaacactctgtttgtaaagtctgcacgtggatattttgaccacttagaggccttcgttggaaacgggtttatttcatgtaaggctagacagaagaattcccagtaacttctttgtgttgtgtgcattcaactcacacagttgaacgttcccttagacagagcagatttgaaacactctatttgtgcaatttgcaagtgtagatttcaagcgctttaaggtcaatggcagaaaaggaaatatcttcgtttcaaaactagacagaatcattcccacaaactgcgttgtgatgtgtttgttcaactcacagagtttaacctttcttttcatagagcagttaggaaacagtctgtttgttaattctgtaagtggatattctgacatcttgtggccttcgttggaaacgggatttcttcatattctgctagacagaagaattctcagaaacttccttgtgttgtgtgttttcaactcacagagttgaacgatcctttacacagagtagacttgaaacactctttttgtgtaatttgcaagtggagatttcagccgctttgaggtcaatggtagaaaaggaaatatcttcgtataaaaactagacagagtgattctcagaaactcctttgtgatgtctgcgttcaactcacagagttgaacctttcttttcatagagcagttaggaaacactctgtttgtaaagtctgcaagtggatattcagacatctttgaggccttcgttggaaacgggatttcttcatataatgctagagagaagaattctcagtaacttaccttgtgttgtgtgtattcaactgacagagttgaactttcatttagagagagcagatttgaaacactgtttttgtggaatttgcaagtggagatttcaagcactttggggccaaaggcagaaaaggaaatatcttcgtataaaaactagacagaatcattctcagaaactgctctgcgatgtgtgcgttcaactctcagagtttaacttttcttttcattcagcagtttggaaacactctgtttgtaaagtctgcacgtgcataatttgaccacttagaggccttcgttggaaacgggtttttttcatgtaaggctagacagaagaattctcagtaacttccttgtgttgtgtgtattcaactcacagagttgaacgatcctttacacagagcagacttgaaacgctcgttttgtggaatttgcaagtggagatttcagccgctttgaggtcaatggtagaaaaggaaatatcttcgtataaaaactagacagaatgattctcagaaactcctttgtgatgtgtgcgttcaactcacagagtttaccctttcttttcatagagcagttaggaaacactctgtttgtaaagtctgcaagtggatattcagacatccttgaggctttcgttggaaacgggatttcttcatattctgctagacagaagaattctcagtaacttccttgtgttgtgtgtattcaactcacagagttgaacgatcctttacacagagcggagttgaaacactctttttgtggaatttgcaagtggagatttcagccgctttgaggtcaatggtagaaaaggaaatatcttcttatacagactatacagaatgattctcagaaactcctttgtgatgtgtgcgttcaactcacagagtttaacctttctgttcatagagcagttaggaaacactctgtttgtaaagtctgcaagtggatattcagacctccttgaggccttcgttggaaacgggatttcttcctattctgctagacagaagaattctcagtaacttccttgtgttgtgtgtattcaactcacagagttgaacgatcctttacacagagcagacttgaaacactctttttgtggaatttgcaagtggagatttcagccgcgttgaggtcaatagtagaaaaggaaatatcttcgtagaaaaactagacagaatgattctcagaaactgctctgcgatgtgtgcgttcaactctcagagtttaacttttcttttcattcagcagtttggaaacactctgtttgtaaagtctgcacgtggatattttgaccacttagaggccttcgttggaaacgggttttttttcctgtaaggctagacagaagaattcccagtaacttgcttgtgttgtgtacattcaactcacagagttgaacgttcccttagacagagcagatttgaaacactctttttgtgcaattggcaagtggagatttcaagcgctttaaggtcaatggcagaaaaggaaatatgttcgtttcaaaactagacagaatcattcccacaaactgcgttgtgatgtgttcgttcacctcacagagtttaacctttctgttcatagagcagttaggaaacactctgtttgtaaagtctgcaagtggatattcagacctctttgaggccttcgttggaaacgggatttcttcatattctgctagacagaagaattctcagtaacttccttgtgttgtgtgtattcaactcacagagttgaacgatcctttacacagagcagacttgaaacactctttttgtggaatttgcaattggagatttcagccgctttgaggtcaatagtagaaaaggaaatatcgtcgtagaaaaactagacagaatgattctcagaaactcctttgtgatgtgtgtgttcaactcacagagtttaacctttcttttcatagagcagttaggaatcactctgtttgtaaagtctgcaagtggatattcagacctgtttgaggccttcgttggaaacgggtttttttcatataaggctagacagaagaattctcagtaacttccttgtgttgtgtgtattcaactgacagaattgaactttcatttagagagagcagatttgaaacactgtttttgtggaatttgcaagtggagatttcaagcgctttggggccaaaggcagaaaaggaaatatcttcgtataaaaagtagacagaatgattctcagaaactcctttgtgatgtgtacgttcaacacacagagtataacttttcttttcatagagcagttaggaaacactctgtttgtaaagtctgcaagtggatattcagacctcctttgaggccttcgttggaaacgggatttcttcatattatgctagacagaagaattcccagtaacttccttgtgttgtgtacattcaactcacagagttgaacgttcccttagacagagcagatttgaaacactctttttgtgcaattggcaagtggagatttcaagcgctttaaggtcaatggcagaaaaggaaatatcttcgtttcaaaactagacagaatgattctcagaaactcctttgtgatgtgtgccgttcaactcagagagtttaacctttcttttcatagagcagttaggaaacacgctgtttataaagtctgcaagtggatattcagacccctttgaggccttcgttggaaacgggatttcttcatattatgctagacagaagaattctcagtaacttccttgtgttgtgtgtattcaactcacagagttgaacgatcctttacacaggagcagacttgaaacactctttttgtggaatttgcaagtggagatttcagccgctttgaggtcaatggtagaataggaaatatcttcctatagaaaatagacagaatgattctcagaaactcctttgtgatgtgtgcgttcaactcacagagtttaacctttcttttcatagagcagttaggaaacactctgtttgtaaagtctgcaagtggatgttcagacctctttgaggccttcgttggaaacgggtttttttcatataaggctagacagaagaattcccactaacatccttgtgttgtgtgtgttcaactcacagagttgaactttcatttacacagagcagatttgaaagactctttttgtggaatttgcaaatggagatttcaagcgctttgaggccaaagacagaaaaggaaatatcttcgtttcaaaactagacagaatcattctcagaaactgctgcgtgatgtgtgcgttcaactctcagagtttaacttttcttttcattcagcggtttggaaacactctgtttgtaaaaactgcacgtggatattttgaccacttagaggccttcgttggaaacgggttttttttcatgtaaggctagacagaagaattcccagtaacttccttgtgttgtgtgcattcaactcacagagttgaacgttcccttagacagagcagatttgaaacactctatttgcgcaatttgcaagtgtagatttcaagcgctttcaggtcaatggcagaaaaggaaatatcttcgtttcaaaactagacagaatgattctcagaaactcctttgtgatgtgtgtgttcaactcacagagtttaacctttcttttcatagagcagttaggaaacactctgtttgtaaagtctgcaagtggatattcagacctcgttgaggccttcgttggaaactggatttcttcatattctgctagacagaagaattctcacaatcttccttgtgttgtgtgtattcaactcacagagttgaacgatggtttacacagagcagatttgaaacactctttttgtggaatttgcaagtggagatttcagccgctttgaggtcaatggtagaaaaggaaatatcttcatataaaaactagacagaatgattctcataaactcctttgtgatgtgtgcgttcaactcacagagtttaacttttcttttcatagagcagttaggaaacactctgtttgtaaagtctgcaagtggatattcagacctctttgaggccttcgttggaaacgggatttcttcatattatgctacacagaagaattttcagtaacttccttgtgttgtgtgtattcaactcacagagttgaactttcatttagagagagcagatttgaaacactgtttttgtggaatttgcaagtggagatttcaagcgctttggggccaaaggcagaaaaggaaatatcttcgtataaaaactagacagaatcattctcagaaactgctgcgtgatgtgtgcgttcaactctcagagtttaacttttcttttcattcagcggtttggaaacactctgtaaagtctgcacgtggatattttgaccacttagaggccttcgttggaaacggtttttttttatgtaaggctagacagaagaattcccagtaacttccttgtgttgtgtgcattcaactcacagagttgaacgttcccttagacagagcagatttgaaacactctatttgtgcaatttgcaagtgtagttttcaagctctttaaggtcaacggcagaaaaggaaatatcttcgtttcaaaactagacagaatcattcccacaaactgcgttgtgatgtgttcgttcaactcacagagtttaacctttctgttcatagagcagttaggaaacactctgtttgtaaagtctgtaagtggatattctgacatcttgtggccttcgtgggaatcgggatttcttcatattctgttagacagaagaattctcagaatcttccttgtgttgtgtgtattcaactcacagagttgaacgatggtttacacgagcagatttgaaacactctttttgtggaatttgcaagtggagatttcagccgctttgaggtcaatggtagaaaaggaaatatcttcgtataaaaactagacagaatgattctcagaaacttcattgtgatgtgtgcgttcaactcacagagtttaacctttcttttcatagagcggttaggaaacactctgtttgtaaactctgcaagtggatattcagacctctttgaggccttcgttggaaacgggatttcttcatactgtgctagacagaagaattctcagtaacttccttgtgttgtgtgtattcaactgacagagttgaactttcatttagagagagcagatttgaaacactgtttttgtggaatttgcaaatggagatttcaagcgctttggggccaaaggcagaaaagaaatatcttcgtataaaaactagacagaatcattctcagaaactgctctacgatgtgtgcgttcaactctcagagtttaacttttcttttcattcagcagtttggaaacactctgtttgtaaagtctgcacgtggataatttgaccacttagaggccttcgttggaaacgggtttttttcatgtaaggctagacagaagaattctcagtaacttccttgtgttgtgtgtattcaactcacacagttgaacgatcctttacacagagcagacttgtaacactctttttgtggaatttgcaagtggagatttcagccgctttgaagtcaaaggtagaaaaggaaatatcttcctattaaaactagacagaatgattctcagaaactcctttgtgatgtgtgcgttcaactcacagagtttaacctttcttttcatagagcagttaggaaacactctgtttgtaaagtctgcaagtggatattcagacatccttgaggccttcgctggaaaagggatttcttcatattatgctggacagaagaattctcagtaacttccttgtgttgtgtttattcaactcacagagttgaatgatcctttacaaagagcagacttgaaacactctttttgtggaatttgcaagtggagatttcagccgctttgaggtcaacggtagaaaagtaaatatcttcgtataaagactagacagaatgattctcagaaacttcattgtgatgtgtgcagttcaactcacagagtttaacctttcttttcatagagcagttaggaaacactctgtttgtgaactctgcaagtggatattcagacgtctttgaggccttcgttggaaatgggatttcttcatactgtgctagacagaagaattctcagtaacttccttgtgttgtgtgtattcaactgacagagttgaactttcatttggagagagcagatttgaaacactgtttttgtggaatttgcaagtggagatttcaagcgctttgcggccaaaggctgaaaaggaaatatcctcgtataaaaacaagacagaatcattctcagaaactgctctgcgatgtgtgcgttcaactctcagagtttaacttttcttttcattcagcagtttggaaacactctgtttgtaaagtctgcacgtggatattttgaccacttagaggccttcgttggagacgggtttttttcctgtaaggctagacagaagaattcccagtaacttccttgtgttgtgtacattcaactcacagagttgaacgttcccttagacagagcagatttgaaacacactttttgtgcaattggcaagtggagatttcaagcgctttaaggtcaatggcagaaaagcaaatatcttcgtttcaaaactagacagaatcattcccacaaactgcgttgtgatgtgttcgttcaactcacagagtttaacctttctgttcatagagcagttaggaaacactctgtttgtaaagtctgcaagtggatattctgacatcttgtggccttcgttggaaacgggatttcttcatattctgctagacagaagaattctcagtaacttccttgtgttgtgtgtattcaactcacagagttgaacgatcctttacacagagcagacttgtaacactctttttgtagaatttggaagtggagatttcagccgctttgaagtcaaaggtagaaaaggaaatatcttcctataaaaactagacagaatgattctcagaaattcctttctgatgtgtgcgttcaactcacagagttcaacctttcttttcatagagcagttgggaaacactctgtttgtaaagtctgcaagtggatattcagacttctttgaggccttcgttggaagcgggatttcttcatgttctgcttgacagaagaattcccagtaacttccttgtgttgtgtgtgttcaactcacagagttgaactttcatttacacagagcagatttgaaacactctttttgtggaatttgcaggtggagatttcaagcgctttgaggccaaaggcagaaaaggaaatatcttcctataaaaactagacagaatgattctcagaaactcctttgtgatgtgggcgttcaactcacagagtttaacctttcttttcatagagcagttaggaaacactctgtttgtaacgtctgcacgtggatatttggacttctttgaggtcttcgttggaaacgggtttttttcatgtaaggctagacagaagaattcccagtaacttccttgtgttgtgtgcattcaactcacagaattgaacgttcccttagacagagcagattttaaacactctatttgtgcaatttgcaagtgtagatttcaagcgctttaaggtcaacggcagaaaagaaaatatcttcgtttcaaaactagacagaatcattcccacaaactgcgttgtgatgtgctcgttcaactcacagagtttaacctttcttttcatagagcagttaggaaacactctgtttgtaaagtctgtaagtggatattctgacatcttgtggccttcgttggaaacgggatttcttcatattatgctagacagaagaattctcagaatcttccttgtgttgtgtgtattcaactcacacagttgaacgattgtttacacagagcagatttgaaacactctttctgtggaatttgcaagtggagatttcagccgctttgaggtccatggtagaaaaggaaatatcttcgtataacaactagacagaatgattctgagaaactcctttgtcatgtgtgcgttcaactcacatagtttaacctttcttttcatagagcagttaggaaacactctgtttgtaaagtctgcaagtggatattcagacctccttgaggcattcgttggaaacgggatttcttcatattatgctagacagaagaattcccagtaacttccttgtgttgtgtgtgttcaactcacagagttgaactttcatgtacacagagcagatttgaaacactcttttcgtggaatttgcaaatggagatttcaagcgctttgaggccaaaggcagaaaaggaaatatcttcgtataaaaactagacagaatcattctcagaaactgctgcgtgatgtgtgcgttcaactctcagagtttaacttttcttttcattcagcggtttggaaacactctgtttgtaaagtctgcacgtggatattttgaccacttagaggccttcattggaaacgggtttttttcatgtaaggctagacagaagaattcccagtaacttccttgtgttgtgtgcattcaactcacagagttgaacgttcccttagacagagcagatttgaaacactctatttgtgcaatttgcaagtgtagatttcaagcgctttaaggtcaatggcagaaaaggaaatatcttcgtttcaaaactacacagaacgattgtcagaaactcctttatgatgtgtgcgttcaactcacagagtttaacctttcttttcatagagcagttaggaaacactctgtttgtaaattctgcaagtggataatgagacctctttgaggccttcgttggaaacgggatttcttcatattctgctagacagaagaattctcagtaacttcctcgtgttgtgtgtattcaactcacagagttgaacgatcctttacacagagcagacttgaaacactctttttgtggaatttgcatatggagatttcagccgctttgaggtcaatggttgaaaaggaaatatcttcatataaaaattagacagaatgattctcagaaactcctttgtgatgtgtgcgttcaactcacagagtttaacctttcttttcatagagcagttaggaaacactctgtttgtaaaggctgcacgtggatatttggacttctttgaggccttcattggaaacgggtttttttcatgtaaggctagacagaagaattctcagtaacttccttgtgttgtgtgtattcaactgacagagttgaactttcatttatagagagcagatttgaaacactgtttttgtggaatttgcaagtggagatttcaagcgctgtggggccaaaggcagaaaaggaaatatcttcgtataaaaacaagacagaatcattctcagaaactgctctgtgatgtgtgcgttcaactctcagagtttaacttttcttttcattcagcagtttggaaacactctgtttgtaaagtctgcacgtggatattttgaacacttcgaggccttcgttggaaacgggtttttttcatgtaaggctagacagaagaattcccagtaacttccttgtgttgtgtgcattcaactcacagagttgaacgttcccttagacagagcagatttgaaacactctatttgtccaatttgcaagtgtagatttcaagcgctttaaggtcaacggcagaaaaggaaatatcttcgtttcaaaactagacagaatgattctcagaaactcctttgtgatgtgtgcattcaactcacagagtttaacctttcttttcatagagcagttaggaaacactctgtttgtaaagtctgcaagtggatattcagacctccttgaggcctacgttggaaacgggatttcttcatattatgctagacagaagaattctcagtaacttccttgtgttgtgtgtattcaactcacagagttgaacgatcctttacacagagcagacttgaaacactctttttgtggaatttgcaagtggagatttcagccgatttgaggtcaatggtagaataggaaatatcttcctttagaaactagacagaatgattctcagaatcttctttgtgatgtgtgcgttcaactcacagagtttaacctttcttttcatagagcaggtaggaaacactctgtttgtaaactctgcaagtggatattcagacctcattgaggccttcgttggaaacgggatttcttcatactatgctagacagaagaattcccagtaacttccttgtgttgtgtgtgttcaactcacagagttgagctttcatttacacagagcagatttgaaacactctttttgtggaatttgcaagtggagatttcaagcgctttgaggccaaaggcagaaaaggaaatatcttcgtataaaaactagacagaatcattctcagaaactgctgcgtgatgtgtgcgttcaactctcagagtttaacttttgttttcattcagcggtttggaaacactctgtttgtaaagtctgcacgtggatattttgaccacttagaggccttcgttggaaacgggttttttttcatgtaaggctacacagaagaattcccattaacttccttgtgttgtgtgcattcaactcacagagttgaacgttcccttagacagagcagatttgaaacactctatttgtgcaatttgcaagtgtagatttcaagcgctttaaggtcaacggcagaaaaggaaatatcttcgtttcaaaactagacagaatgattatcataaactcctttgtgatgtgtgccttcaactcacagagtttaacctttcttttcatagagcagttaggaaacactctgtttgtaaagtctgcaagtggatattcagacctccttgaggccttcgttggaaacgggatttcttcatattctgctagacagaagaattctcagtaacttccttgtgttgtgtgtattcaactcacagagttgaacgatcctttacacagagcagacttgaaacactctttttgtggaatttgcaagtggagatttcagccgctttgaggtcaatggtagaaaaggaaactatcttcgtataaagactagacagaacgattctcagaaactcctttgtgatgtgtgcgttcaactcacagagtttaacctttcttttcatagagcagttaggaaacactctgtttgtaaagtctgcaagtggatattcagacctccttgaggccttcgttggaaacgggatttcttcatattctgctagacagaagaattctcagtaacttccttgtgttgtgtgtatgcaactcacagagttgaacgatcctttacacagagcagacttgaaacactctttttgtggaatttgcaagtggagatttcagccgctttgaggtcaatagtagaaaaggaaatatcttcgtagaaaaactacacagaatcattctcagaaactgctgtgtgatgtgtgcgttcaactctcagagtttaacttttcttttcattcagcggtttggaaacactctgtttgtaaagtctgcacgtggatattttgaccacttagaggccttcgttggaaacgggtttttttcatgtaaggctagacagaagaattctcagtaacttccttgtgttgtgtgtattcaactcacagagttgaacgatcctttacacagagcagacttgaaacactctttttgtggaatttgcaagtggagatttcagccgctttgaggtcaatggtagaaaagaaaatatcttcgtagaaaaactagacagaatgattctcagaaactcctttgtgatgtgtgtgttcaactcacagagtttaacctttcttttcatacagcagttagtaaacactctgtttataaagtctgcatgtggatattcagaaccctttgaggccttcgttggaaacgggatttcttcatattatgctagacagaagaattctcagtaacttccttgtgttgtgtgtattcaactcacagaagttgaacgatcctttacacagagcagacttgaaacattctttttgtggaatttgcaagtggagatttcagccgcttagaggtcaatggtagaataggaaatatcttcctatagaaactagacagaatgattctcagaaactcctttgtgatgtgtgcgttcaactcacagagtttaacctttctgttcatagagcagttaggaaacactctgtttgtaaagtctgcaagtggatattcagacctccttgaggccttctttggaaacgggatttcttcatattctgctagacagaagaattcccagtaacttccttgtgttgtgtgtgttcaactcacagagttgaactttcatttacacagagcagatttgaaacactctttttgtggaatttgaaagtggagatttcaagcgctttgaggccaaaggcagaaaaggaaatatcttcgtataaaaactagacagaatgattctcagaaactgctctgcgatgtgtgcgttcaactctcagagtttaacttttcttttcattcagcagtttggaaacactctgtttgtaaagtctgcacgtggatattttgaccacttagaggccttcgttggaaacgggtttttttcctttaaggctagacagaagaattcccagtaacttccttgtgttgtgtacattcaactcacagagttgaacgttccctcagacagagcagatttgaaacactctttttgtgcaattggcaagtggtgatttcagccgctttgaggtcaatggtagaaaaggaaatatcttcgtataaaaactagacagaatgattctaagaaaatattttgtgatgtgtgcgttcaactcacagagtttaacttttcttctcatagagcagttaggaaacactctgtttgtaaagtgtgcaagtggatattcagacctctttgaggccttcgttggaaaagggatttcttcatattatgctagacagaataattctcagtaacttgccttgtgttgtgtgtattcaactcacagagttgaaagaccctttacagagagcaggcttgaaacactctttttgtcgaatttgcaagtggagatttcagccgctttgaggtcaatggtagaataggaaatatcttcttatagaaactagacagaatcattctcagaaactcctttgtgatgtgtgtgttcaactcacagagtttaacctttcttttcatagagcagttagtaaacactctgtttataaagtctgcaagtggatattcagacccctttgaggccttcgttggaaacggggatttcttcatattatgctagacagaagaattctcagtaacttccttgtgttgtgtgtattcaactgacagagttgaactttcatttagagagagcagatttgaaacactgtttttgtggaatttgcaagaggagatttcaagcgctttggggccaaaggcagaaaaggaaatatcttcgtataaaaactagacagaatcattctcagaaactgctgcgtgatgtgtgcgttcaactctcagagtttaacttttcttttcattcagcggtttggaaacactctgtttgtaaagactgcacgtggatattttgaccacttagaggccttcgttggaaaggggttttttttcatgtaaggctagacagaagaattcccagtaacttccttgtgttgtgtgcattcaactcacagagttgaacgttcccttagacagagcagatttgaaacactctatttgtgcaatttgcaagtgtagatttcaagcgctttaaggtcaatggcagaaaaggaaatatcttcgtttgaaaactagacagaatgattctcagaaactcctttgtgatgtgtgcgctcaactcacagagtttaacctttcttttcatagagcagttaggaaacactctgtttgtaaagtctgtaagtggatattctgacatcttgtggccttcgttggaaacgggatttcttcatattctgctagacagaagaattctcagtaacttccttgtgttgtgtgtattgaactcacagagttgaacgatcctttacacagagcagacttgaaacactctttttgtggaatttgcaagtggagatttcagccgctttgaggtcaacagtagaaaaggaaatatcttcgtagaaaaactagacagattgattctcataaactcctttgtgatgtgtgcgttcaactcacagagtttaacctttcttttcatagagcagttaggaaacactctgtttgtaaagtctgcaagtggatattcagacctctttgaggccttcgttggaaacgggatttcttcatattctgctagacagaagaattcccagtaacttccttgtgttgtgtgtgttcaactcacagagttgaactttcatttacacagagcagatttgaaacactctttttgtggaatttgcaaatggagatttcaagcactttgaggccaaaggcagaaaaggaaatgtcttcgtttcaaaactagacagaatcattctcagaaactgctgcgtgatgtgtgcgttcaactctcagagtttaacttttcttttcattcagcggtttggaaacactctgtttgtaaagtctgcacgtggatattttgaccacttagaggtcttcgttggaaacgggttttttttaatgtaaggctagacagaagaattcccagtaacttccttgtgttgtgtgtattcaactcacagagttgaacgttcccttagacagagcagatttgaaacactctatttgtgcaatttgcaagtgtagatttcaagcgctttaaggtcaatggcagaaaaggaaatatcttcgtttgaaaactagacagaatcattcccacaaactgcgttgtgatgtgttcgttcaactcacagagtttaacctttcttttcatagagcagttaggaaacagtctgtttgtcaattctgtaagtggatattctgacatcttgtggccttagttggaaacgggatttcttcatattctgctagacagaagtattctctttaacttccttgtgttgtgtgtattcaactcacagagttgaacgatcctttacacagagcagacttgaaacactctttttgtggaatttgcaagtggagatttcagccgctttgaggtcaatgttagaataggaaatatcttcctatagaaactagacagaatgattctcagaaactcctttgtgatgtgtgcgttcaactcacagagtttaacctttcttttcatagagcagttaggaaacactctgtttgtaaagtctgcaagtggatattcagacctctttgaggccttcgctggaaacgggtttttttcatataaggctagacagaagaattcccagtaacttccttgtgttgtgtgtgttcaactcacagagttgaactttcatttacacagagcagatttgaaacactctttttgtggaatttgcaggtggagatttcaagcgctttgaggccaaaggcagaaaaggaaatatcttcgtttcaaaactagacagaatcattctcagaaactgctgcgtgatgtgtgcgttcaactgtcagagtttaacttttcttttcattcagcggtttggaaacactctgcaaagtctgcacgtggatattttgaccacttagaggccttcgttggaaacgggttttttttatgtaaggctagaccgaagaattccccgtaacttccttgtgttgtgtgcattcaactcacagagttgaacgttcccttagacagagcagatttgaaacactctatttgtgcaatttgcaagtgtagttttcaagctctttaaggtcaacggcagaaaaggaaatatcttcgtttcaaaactagacagaatcattcccacaaactgcgttgtgatgtgttcgttcaactcacagagtttaacctttcttttcatagagcagttaggaaacagtctgtttgtcaattctgtaagtggatattctgacatcttgtggccttagttggaaacgggatttcttcatattctgctagacagaagaattcccagtaatttccttgtgttgtgtggattcaactcacagagttgaacgatactttaaacagagcagattagaaacactctttttgtggaatttgcaagtggagatttcagccgctttgaggtcaatggtagaaaagggaatatcttcgtataaaaactagacagaatgattctcagaaactcctttgtaatgtgtgtgttcaactcacagagtttaacctttctgttcatagagcagttaggaaacactctgtttgtaaagtctgcaagtggatattcagacctctttgaggccttcgttggaaacgggatttcttcatattctgctagacagaagaattctcagaaacttccttgtgttgtgtgttttcaactcacagagttgaacgatgctttacacagagtagacttgaaacactctttttgtgtaatttgcaagtggagatttcagccgctttgaggtcaatggtagaaaaggaaatatcttcgtataaaaactagacagaatgattctcagaaactcctttgtgatgtgtgcgttcaactcacagagtttatcctttcttttcatagagcagttaggaaacactctgtttgtaaagtctgcaagagaatattcagacatctttgagactttcgttggaaacgggatttcatcatattctgctagacagaagaattctcagtaacttccttgtgttgtgtgtattcaactgacagagttgaactttcatttagagagagcagatttgaaacactgtttttgtggaatttgcaagtggagatttcaaacgctttggggccaaaggcagaaaaggaaatatcttcgtataaaaactagacagactcattctcagaaactgctctgcgatgtgtgcgttcaactctcagagtttaacttttcttttcattcagcagtttggaaacactctgtttgtaaaatctgcacgtggatattttgaccacttagaggccttcgttggaaacgggtttctttcctgtaaggctagacagaagaattcccagtaacttccttgtgttgtgtacattcaactcacagagttgaacgttcccttagacagagcagatttgaaacactctttttgtgcaattggcaagtggagatttcaagcgctttaaggtcaatggcagaaaaggaaatatcttcgtttcaaaactagacagaatcattcccaaaaactgcgttgtgatgtgttcgttcatctcacagagtttaacctttcttttcatagagcagttaggaaacagtctgtttgtaaattctgtaagtggatattctgacatcttgtggccttcgttggaaacgggatttcttcatattctgctagacagaagaattctcagtaactgccttgtgttgtgtgtattcaactcacagagttgaacgatcctttacacagaacagacttgaaacactctttttgtggaatttgcaagtggagatttcagccgctttgaggtcaatggtagaataggaaatatcttcctgtagaaactagacagaatgattctcagaaactcctttgtgatgtgtgcgttgaactcacagagtttaacctttcttttcatagagcagttaggaaacactctgtttgtaaagtctgcaagtggatattcagacctccttgagaccttcgttggaaacgggatttcttcatattatgctagacagaagaattctcagtaacttccttgtgttgtgtgtattcaactgacagagttgaactttcatttagagagagcagatttgaaacactctttttgtggaatttgcaagtggagatttcaagcgctttgtggccaaaggcagaaaacgaaatatcttcgtataaaaactagacagaatcattctcagaaactgctgagtgatgtgtgcgttcaactctcagagtttaacttttcttttcattcagcggtttggaaacactctgtttgtaaagtctgcacgtggacattttgaccacttagaggccttcgttggaaacgggtttttttcatgtaaggctagacagaagaattcccagtaacttccttgtgttgtgtgcattcaactcacagagttggacgttcccttagaaagagcagatttgaaacactctatttgtgcaatttgcaagtgtagatttcaagctctttaaggtcaatggcagaaaaggaaatatcttcgtttcaaaactagacagaatcattcccacaaactgcgttgtgaggtgttcgttcaactaacagagtttaacctttctgttcataaagcagttaggaaatactctgtttgtaaagtctgaaagtggatattctgacatcttgtggccttcgttggaaacgggatttcttcatattctgctagacagaagaattctcagaaacttccttgtgttgtgtgtattcaactcacacagttgaacgatggtttacacagagcagatttgaaacactctttttgtggaatttgcaagtggagatttcagccgctttgaggtcaatggtagaaaaggaaatatcttcgtataaaaactagacagaatgattctcagaaactcctttgtgatgtgtgcgttcaactcacagagtttaacctttctgttcatagagccgttaggaaacactctgtttgtaaagtctgcaagtggatattcagacctctttgaggccttcgttggaaacgggatttcttcatattctgctagacagaagaattcccagtaacttccttgtgttgtgtgtgttcaactcacagagttgaactttcatttacacagagcagatttgaaacactctttttgtggaatttgcaagtggagatttcaagcgctttgaggccaaagcagaaaaggaaatatcttcgtataaaaactagacagaatcattcttagaaactgctctgcgatgtgtgcgttcaactctcagagtttaacttttcttttcattcagcagtttggaaacactctgtttgtaaagtctgcacgtggataacttgaccacttagaggccttcgttggaaacgggtttttttcatgtaaggctagacagaattcccagtaacttccttgtgttgtgtacattcaactcacagagttgaacgttcccttagacagagcagatttgaaacactctttttgtgcaattggcaagtggagatttcaagcgctttaaggtcaatggcagaaaaggaaatatcttcgtttcaaaactagacagaatcattcccacaaactgcgttgtgatgtgttcgttcatctcacagagtttaacctttcttttcatagagcagttaggaaacagtctgtttgtaaattctgtaagtggatattctgacatcttgtggccttcgttggaaacgggatttcttcatattctgctagacggaagaattctcagtaacttccttgtgttgtgtgtattcaactcacagagttgaacgatcctttacacagagcagacttgaaacactctttttgtggaatttgcaagtgcagatttcagccgctttgaggtcaatggtagaaaaggaaactatcttcatataaagactagacagaatgattctcagaaactcctttgtgatgtgtgtgttcaactcacagagtttaacctttcttttcatagagcagttagtaaacactctgtttataaagtctgcaagtggatattcagacccctttgtggccttcgttggaaacgggatttcttcatattatgctagacagaagaattcccagtaacttccttgtgttgtgtgtgttcaactcacagagttgaactttcatttacacagagcaggtttgagacactctttttgtggaatttgctaatggagatttcaagcgctttgaggccaaaggcagaaaaggaaatatcttcgtataaaaactagacagaatcattctcagaaactgctctgcgatgtgtgcgttcaactctcagagtttaacttttcttttcattcagcagtttggaaacactctgtttgtaaagtctgcacgtagataatttgaccacttagaggccttcattggaaacgggtttttttcctgtaaggctagacagaagaattcccagtaacttccttgtgttgtgtacattcaactcacagagttgaacgttcccttagacagagcagatttgaaacactctttttgtgcaattggcaagtggagatttcaagcgctttgaggtcaatggcagaaaaggaaatatcttcgtttcaaaactagacagaatcattcccacaaactgcgttgtgatgtgttcgttcaactcacagagtttaacctttctgttcacagagcagttaggaaacactctgtttctaaagtctgtaagtggatattctgacatcttgtggccttcgttggaaacgggatttcttcatattctgctagacagaagaattctcactaacttccttgtgttgtgtgtattcaactcacagagttgaacgatcctttacagagagcagacttgaaacactctttttgtggaatttgcaagtggagatttcagccgctttgaggtcaatggtagaaaaggaaatatcttcgtataaagactagacagaatgattctcagaaactcctttgtgatgtgtacgttcaactcacagagtttaacctttcttttcttagagcagttaggaaacactctgtttgtaaagtctgcaagtggatattcagacctccttgaggccttcgttggaaacgggtttttttcatataaggctagacagaagaattcccagtaacttccttgtgttgtgtgtgttcaactcacagagttgaactttcatttacacagagcagatttgaaacactctttttgtggaatttgaaagtggagatttcaagcgctttgaggccaaaggcagaaaaggaaatatcttcgtttcaaaactagacagaatcattctcagaaactgctgcgtgatgtgtgcgttcaactctcagagtttaacttttcttttcattcagcggtttggaaacactctgtttgtaaagtctgcacgtggatattttgaccacttagaggccttcattggaaacgggtttatttcatgtaaggctagacagaagaattctcagtaacttccttttgttgtgtacattcaactcacagagttgaacgttcccttacacagagcagatttgaaacactctttttgtgcaattggcaagtggagatttcaagcgctttgaggccaaaggcagaaaaggaaatatcttcgtataaaaactagacagaatcattcccacaaactgcgttgtaatgtgtgcgttcaactcacagagtttaacctttcttttcatagaacagttaggaaacactctgtttgtaaagtctgcaagtggatattcagacctctttgaggccttcgttggaaacgggatttcttcatattctgctagacagaagaattctcagtaacttccttgtgttgtgtgtattcaactcccagagttgaacgttcccttagacagagcagatttgaaacactctttttgtgcaattggcaagtggtgatttcagccgctttggggtcaatggtagaaaaggtaatatcttcgtataaaaactagacagaatgattctcagaaacttcattgtgacgtgtgcgttcaactcagagagtttaacctttcttttcatagagcagttaagaaacactctgtttgtaaagtctgcaagtggatattcagacctctttgaggccttcgttggaaacgggatttcttcatactgtgctagacagaagaattccgagtaacttccttgtgttgtgtgtgttcaactcacagagttgaactttcatttacacagagcagatttgaaacactctttttgtggaatttgcaagtggagatttcaagcgctttgaggccaaaggcagaaaaggaaatatcttcgtttcaaaactagacagaatcattctcagaaactgctctgttatgtgtgcgttcaactctcagagtttaacttttcttttcattcagcagtttggaaacactcagtttgtaaagtctgcacgtggatattttgaccacttagaggtcttcgttggaaacgggtttttttcatgaaaggctagacagaagaattcccagtaacttccttgtgttgtgtacattcaactcacagagttgaacgttcccttagacagagcagatttgaaacactctttttgtgcaattggcaaatggagatttcaagtgctttaaggtcaatggcagaaaaggaaatatcttcgtttcaaaactagacagattgattctcagaaactcctttgtgatgtgtgcgttcaactcacagagtttaacctttcttttcatagagcagttaggaaacactctgtttgtaaagtctgcaagtggatattcagacctctttgaggccttcgttggaaacgggatttcttcctattatgctagacagaagaattctcagtaacttccttgtgttgtgtgtattcaaatcacagagttgaacgatcctttacacagagcagacttcaaacactctttttgtggaatttgcaagtggagatttcagccgctttgaggtcaatagtagaaaaggaaatatcttcgtagaaaaactagacagaatgattctcagaaactcctttgtgatgtgtgcgttcaactcacagagtttaacctttctgttcatagagctgttaggaaacactctgtttgtaaagtctgcaagtggatattcagacctccttcaggccttcgttggaaacgggatttcttcatattctgctagacagaagaattctcagtaacttccttgtgttgtgtgtgttcaactcacagagttgaactttcatttacacagagcagatttgaaacactctttttgtggaatttgcaagtggagatttcaagcgctttgaggccaaaggcagaaaaggaaatatcttcgtttcaaaactagacagaatcattctcagaaactgctctgcgatgtgtgcgtttaactctcagagtttaacttttcttttcattcagcagtttggaaacactctgtttgtaaagtctgcacgtggataatttgactacttagaggccttcgttggaaacgggtttttttcatgtaaggctagacagaagaattcccagtaacttccttgtgttgtgtacattcaactcacagagttgaacgttcccttaaacagagcagatttgaaacactctttttgtgcaattggcaagtggagatttcaagcgctttgaagtcaatggcagaaaaggaaatatcttcgtttcaaaactagatagaatcattcccacaaactgcgttgtgatgtgttcgttcaactcacagagtttaacctttcttttcatagagcagttaggaaacagtctgtttgtaaattctgtaagtggatattctgacagcttgtggccttcgttggaaacgggatttcttcatactatgctagacagaagaattctcagtaacttccttgtgttgtgtgtattcaactcacagtgttgaacgatcctttacacagagcatacttgaaacactcttgttgtggaatttgcaagtggagaattcagccgctttgaggtcaatggtagaataggaaatatcttcctatagaaactagacagaatgattctcagaaacttcattgtgatgtgtgcgttcaactcacagtttaacctttcttttcatagagcagttaggaaacactctgtttgtaaactctgcaagtggatattcagacctctttgaggccttcgttggaaacgggtttttttcatataaggctagacagaagaattcccagtaacttccttgtgttgtgtgtgttcaactcacagagttgtactttcatttacacagagcagatttgaaacactctttttgtggaatttgcaaatggagatttcaagcgctttgaggccaaaggcagaaaaggaaatatcttcgtataaaaactagacagaatcattctcagaaactgctctgcgatgtgtgcgttcaactctcagagtttaacttttcttttcattcagcagtttggaaacacactgtttgtaaagtctgcacgtggatactttgaccacttagaggccttcgttggaaacgggtttttttcctgtaaggctagacagaataattcccagtaacttccttgtgttgtgtacattcaactcacagagttgaacgttcccttggacagagcagatttgaaacactctttttgtgcaattggcaagtggagatttcaagcgcttaaggtcaatggcagaaaaggaaatatcttcgtttcaaaactagacagaatcattcccacaaactgcgttgtgatgtgttcgttcaactcacagagtttaaccattcttttcatagagcagttaggaaacactctgtttgtaaattctgtaagtggatattctgacatcttttggccttcgttggaaacgggatttcttcatattctgctagacagaagaattctcagtaacttccttgtgttgtgtgtattcaactcacagagttgaacgatcctttacacagagcggacttgaaacactcgttttgtggaatttgcaagtggagatttcagccgtgttgaggtaaatagtagaaaaggaaatatcttcgtataaaaactagacagaatgattctcataaactcctttgtgatgtgtgcgttcaactcacagagtttaacctttcttttcatagagcagttaggaaacactctgtttgtaaagtctgcaagtggatattcagacctctttgaggccttcgttggaaacgggatttcttcctattctgctagacagaagaatttccagtaacttccttttgttgtgtgtgttcaactcacagagttgaactttcatttacacagagcagatttgaaacactctttttgtggaatttgcaagtggagatttcaagcgctttgaggccaaaggcagaaaaggaaatatcttcgtataaaaactagacagaatcattctcagaaactgctgcgtgatgtgtgcgttcaactatcagagtttaacttttcttttcattcagcggtttggaaacactctgtttgtaaagtctgcacgtggatattttgaccacttagaggccttcgttggaaacgggttttttgcatgtaaggctaaacagaagaattcccagtaacttccttgtgttgtgtacattcaactcacagagttgaacgttcccttagacagagcagatttgaaacactctttttgtgcaattggcaagtggttatttcagccgctttgaggtcaatggtagaaaaggaaatatcttcgtataaaaactagacagaatgattctcagaaacttcattgtgatgtgtgcgttcaactcacagagtttaacctttctttttatagagcagttaggaaacactctgtttgtaaactctgcaagtggatattcagacctctttgaggccttcgttggaaacgggttttcttcatactgtgctagacagaagaattctcagtaacttccttgtgttgtgtgtattcaactcacagagctgaacgatcctttacacagggcggacttgaaacactctttttgtggaatttgcaagtggagatttcagccgctttgaggtcaatgttagaaaaggaaatatcttcgtataaaaactagacagaatgattctcagaaactcctttgtgatgtgtgcgttcaactcatagagtttaacttttcttttcatagagcagttaggaaacactctgtttgtaaagtcttcaagtggatattcagacctctttgaggccttcgttggaaacgggatttcttcatattctgctagacagaagaattctcagtaacttccttgtgttgtgtgtattcaactcacagagttgaactttcatttagagagagcagatttgaaacactgtttttgtggaatttgcaagtggagatttcaagcgctttggggccaaaggcagaaaaggaaatatcttcgtataaaaactagacagaatcattctcagaaactgctgcatgatgtgtgcgttcaactctcagagtttaacttttcttttcattcagcggtttggaaacactctgtttgtaaagtctgcacgtggatattttgaccacttagaggccttcgttagaaacgggtttttttcatgtaaggctagacagaagaattcccagtaacttccttgtgttgtgtgcattcaactcacagagttgaacgttcccttagacagagcagatttgaaacactctatttgtgcaatttacaagtgtagatttcaagcgctttaaggtcaacggcagaaaaggaaatatcttcgtttcaaacctagacagaatcattcccacaaactgcgttgtgatgtgttcgttcaactcacagagtttaacctttctgttcatagagcagttaggaaacactctgtttgtaaagtctgcaagtggatattcagacctcctagaggccttcgttggaaacgggatttctccatattctgctagacagaagaattgtcagaaacttcgttgtgttgtgtgttttcaactcacagagttgaacgatcctttacacagaatagacttgaaacactctttttgtggaatttgcaagtggagatttcagccgctttgaggtcaatggtagaaaaggaaatatcttcgtataaaaactagacagaatgattctgagaaactcctttgtgatgtgtgcgttcaacacacagagtttaacctttcttttcatagagcagttaggaaacactctgtttgtaaagtctgcaagtggatattcagacctccttgaggccttcgttggaaacgcgatttcttcatattatgctagacagaagaattctcagtaacttccttgtgttgtgtgtattcaactgacagagttgaactttcatttggagagagcagatttgaaacactgtttttgtggaatttgcaagtggagatttcaagcgctttggggccaaaggcagaaaaggaaatatcttcgtagaaaaactagacagaatcattctcagaaactgctgcgtgatgtgtgcgttgaactctcagagtttaacttttcttttcattcagcggtttggaaacactctgtttgtaaagtctgcacgtggatattttgaccacttagaggccttcgttggaaacgggtttttttcatgtaaggctagacagaagaattcccagtaacttcccttgtgttgggtgcattaaactcacagagttgaacgttcccttagacagagcagatttgaaacactctatttgtgcaatttgcaagtgtagatttcaagcgctttaaggtcaatggcagaaaaggaaatatcttcgtttcaaaactagacagaatcattcccacaaactgcgttgcgatgtgttcgttcaactcacacagtttaacatttcttttcatagagcacttaggaaacagactgtttgtaaattctgtaagtggatattctgacatcttgtggccttcgttggaaacaggatttcttcatattctgctagacagaataattctcagtaacttccttgtgttgtgtgtattcaactcacagagttgaatgatcctttacacagagcagacttgaaacactctttttgtggaatttgcaagtggagatttcagccgctttgaggtcaatggtagaaaaggaaactatcttcatataaagactagacagaatgattctgagaaactcctttgtgatgtgtgcattcaactcacaaagtttaacctttcttttcatagagcagttaggaaacactctgtttgtaaagtctgcaagtggatattcagacctccttgaggccttcgttggaaacgggatttcttcatattatgctagacagaagaattgtcagtaacttccttgtgttgtgtgtattcaactcacagagttgaacgatcctttacacagagcagacttgaaacactctttttgtggaatttgcaagtggagatttcagccgctttgagttcaagggtagaataggaaatatcttcctatagaaactagacagaatcattctcagaaactgctctgcgatgtgtgcgttcaactctcagagtttaacttttcttttcattcagcagtttggaaacactctgtttgtaaagtctgcacgtggatattttgaccacttagaggccttcgttggaaacgggtttctttcttgtaaggctagacagaagaattcccagtaactttccttgtgttgtgtgcgttcaactcacagagttgaactttcatttacacagagcagatttgaaacactctttttgtggaatttgcaaatggagatttcaagcgctttgaggccaaaggcagaaaaggaaatgtacttcgtttcaaaactagacagaatcattcccacaaactgcgttgtgatgtgttcgttcaactcacagagtttaacctttcggttcatagagcagttaggaaacactctgtttgtaaagtctgtaagtggatattctgacgtcttgtggccttcgtttgaaaagggatttcttcatattctgctagacagaagaattctcggtaacttccttgtgttgtgtgtattcaactcacagagttgaacgatcctttacacagagcagacttgaaacactctttttgtggaatttgcaagtggagatttcagccgctttgaggtcaatgttagaataggaaatatcttcatatagaaactagacagaatgattctcagaaactcctttgtgatgtgtgcgttcaactcacagagtttaacctttcttttcatagagcagttaggaaacactgtgtttgtaaagtctgcaagtggatattcagacctccttgaggcattcgttggaaacgggatttcttcatattatgctagacagaagaattcccagtaacttccttgtgttgtgtgtgttctactcacagagttgaactttgatttacacagagcagatttgaaacactctttttgtggaatttgcaagtggagatttcaagcgctttgaggccaaaggcagaaaaggaaatatcttcgtataaaaactagacagaatcattctcagaatctgctgcgtgatgtgtgcgttcaactctcagagtttaacttttcttttcattcagcggtttggaaacactctgtttgtacagtctgcacgtggatattttgaccacttagaggccttcgttggaaacgggtttttttcatgtaaggctagacagaagaattcccagtaacttccttgtgttgtgtgcattcaactcacagagttgaacgttcccttagacagagcagatttgaaacactctatttgtgcaatttgcaagtgtagttttcaagctctttaaggtcaacggcagaaaaggaaatatcttggtttcaaaactagacagaatcattcccacaaacagcgttgtgatgtgttcgctcaactcacagagtttaacctttcttttcatagagcagttaggaaacagtctgtttgtcaattctgtaagtggatattctgacatcttgtggccttcgttggaaacgggatttcttcatattctgctagacagaagaattctcagtaacttccttgtgttgtctgtattcaactcacagagttgaacgatcctttacacagagcagacttgaaacactctttttgtggaatttgcaagtggagatttcagccgctttgaggtcaatagtagaaaaggaaatatcttcgtataaagactagacagaatgattctcagaaactcctttgtgatgtgtgcgttcaactcacagagtttaacctttcttttcatagagcagttgggaaacactctgtttgtaaagtctgcaagtggatattcagacatccttgaggctttcgttggaaacgggatttcttcatattctgctagaaggaagaattctcagtaacttccttgtgttgtgtgtatacaactcacagagttgaacgatcctttacacagagcggacttgaaacacactttttgtggaatttgcaagtggagatttcaagcgctttgaggccaaaggcagaaaaggaaatatcttcgtataaaaactagacagaatcattctcagaaactgctgtgtgatgtgtgccttcaactctcacagtttaacttttcttttcattcagcggtttggaaacactctgtttgtaaagtctgcacgtggatattttgaccacttagaggccttcgttggaaacgggtttttttcatgtaaggctagacagaagaattctcagtaacttccttgtgttgtgtgtattcaactcacacagttgaacgatcctttacacagagcagacttgtaacactctttttgtggaatttgcaagtggagatttcagccgctttgaagtcaaatgtagaaaaggaaatatcttcctataaaaactagacagatgattctgagaaactcctttgtgatgtgtgcgttcaactcacagagttcaacctttcttttcatagagcagttaggaaacactctgtttgtaaagtctgcaagtggatattcagacatctttgaggctttcgttggaaacaggatttcttcatattctgctagacagaagattctcagtaacttccttgtgttgtgtgtattcaactcacagagttgaacgatcctttacacagagcagacttgaaacactctttttgtggaatttgcaagtggagatttcagccgctttgaggtcaatggtagaataggaaatatcttcctatagaaactagacagaatgattctcagaaactcctttgtgatgtgtgtgttcaactcacagagtttaacctttcttttcatagagcagttaggaaacactctgtttgtaaagtctgcaagtggatattcagacctctttgaggccttcgttggaaacgggattttttcgtataaggctagacagaagaattcccagtaacatccttgtgttgtgtgtgttcaactcacagagttgaactttcatttacacagagcagatttgaaacactctttttgtggaatttgcaaatggagatttcaagcgctttgaggccaaaggcagaaaaggaaatatcttcgtataaaaactagacagaatcattctcagaaactgctctgcgatgtgtgcgttcaactctcagagtttaacttttcttttcattcagcagtttggaaacactctgtttgtaaagtctgcacgtggatattttgaccacttagaggccttcgttggaaacgggtttttttcctgtaacgctagacagaagaattcccagtaacttccttgtgttgtgtacattcaactcacagagttgaacgttcccttagacagagcagatttgaaacactctttttgtgcaattggcaagtggagatttcaagcgctttgaggtcaatggcagaaaaggaaatatcttcgtttcaaaactagacagagtgattctcagaaactcctttgtgatgtctgcgttcaactgacagagtttaacctttcttttcatagagcagttaggaaacactctgtttgtaaagtctgcaattggatattgagacctccttgaggccttcgttggaaacgggatttcttcatattctgctatacagaagaattctcagaaacttccttgtgttgtgtgtattcaactcacagagttgaacgatcctttacacagagcagacttgaaacactctttttgtggaattggcaagtggagatttcagccgctttgaggtcaatggcagaaaaggaaatatcttcgtataaaaactagacagaatgattctcagaaacttcattgtgatgtgtgcgttcaactcacagagcttaacctttcttttcatagagcagttaggaaacactctgtttgtaaactctgcaagtggatattcagacctctttgaggccttcgttggaaacgggatttcttcatactgtgctagacagaagaattcccagtaacttccttgtgtagtgtgtgttcgactcacagagttgaactttcctttacacagagcagatttgaaacactctttttgtggaatttgcaagtggagatttcaagcgctttgaggccaaaggcagaaaaggaaatatcttcgtttcaaaactagacagaatcattctcagaaactgctgcgtgatgtgtgcgttcaactctcagagtttaacttttcttttcattcagcggtttggaaacactgtgtttgtaaagtctgcacgtggatattttgaccacttagaggccttcgttggaaacgggtttctttcatgtaaggctagacagaagaattcccagtaacttccttgtgttgtgtgcactcaactcacagagttgaacgttcccttagacagagcagatttgaaacactctatttgtgcaatttgcaagtgtagatttcaagcgctttaaggtcaatggcagaaaaggaaatatcttcgtttcaaaactagacagaatcattcccacaaactgcgttgtgatgtgttcgttcaactcacagagtttaacctttctgttcatagagcagttaggaaacactgtgtttgtaaagtctgtaagtggatattctgacatcttctggccttcgttggaaacgggatttcttcatattctgctagacagaagaattctcagaatcttccttgtgttgtgtgtattcaactcacagagttgaacgatggtttacacagaacagatttgaaacactctttttgtggaatttgcaagtggagatttcagccgctttgaggtccgtggtagaaaaggaaatatcttcgtataaaaactagacagaatgattctcagaaactcctttgtgatgtgtgcgttcaactcacagagtttaacctttcttttcatagagcagttaggaaacactctgttggtaaagtctgcaagtggatattcagacctctttgaggccttcgttggaaacgggtttttttcatataaggctagacagaagaattcccagtaacttccttgtgttgtgtgtgttcaactcacagagttgaactttcatttacacagagcagatttgaaacactctttttgtggaatttgcaagtggagatttcaggcgctttgaggccaaaggcagaaaaggaaatatcttcgtataaaaactagacagaatcattctcagaaactgctgtgtgatgtgtacgttcaactctcagagttcaacttttcttttcattcagcggtttggaaacactctgtttgtaaagtctgcacgtggatattttgaccacttagaggccttcgttggaaacggttttttttcatgtaaggctagacagaagaattcccagtaacttccttgtgttgtgtgtgttcaactcacagagttgaactttcatttacacagagcagatttgaaacactctttttgtggaatttgcaaatggagatttcaagcgctttgaggccaaaggcagaaaaggaaatatcttcgtttcaaaactagacagaatcattctcagaaacttctttgtgatgtgtgcgttcaactcacagagtttaacctttcttttcatagagcagttaggaaacactctgtttgtaaagtctgcaagtggatattcatacctctttgaggccttcgttggaaacgggatttcttcatactatgctagacagaagaattctcagtaacttccttgtgttgtgtgtattcaactcacagtagttgaacgatcctttacacagagcagtcttgaaacactctttttgtggaatttgcaagtggagatttctgccgctttgaggtcaatggtagaataggaaatatcttcctatagaaactagacagaatgattctcagaaaatcttttgtgatgtgtgcgttcaactcacagagtttcacttttcttctcatggagcagttaggaaacactctgtttgtaaagtctgcaagtggatattcagacccctttgaggccttcgttggaaacgggatttcttcatattctgctagacagaagaattctcagtaacttccttgtgttgtgtgtattcaactgacagagttgaactttcgtttagagagagcagatttgaaacactgtttttgtggaatttgcaagtggagatttcaagcgctttggggccaaaggcaaaaaacgaaatatcttcgtataaaaactagacagaatcattctcagaaactgctgcgtgatgtgtgcgttcaactctcagagtttaacttttcttttcattcagcggtttggaaacactctgtttgtaaagtctgcacgtggacattttgaccacttagaggccttcgttggaaacgggtttttttcatgtaaggctagacagaagaattcccagtaacttccttgtgttgtgtacattcaactcacagagttgaacgttcccttagacagagcagatttgaaacactctttttgtgcaattggcaagtggagatttcaagcgctttaaggtcaatggcagaaaaggaaatatcttcgtttcaaaactagacagaatcattcccacaaactgcgttgtgatgtgttcgttcatctcacagagtttaacctttcttttcatagagcagttaggaaacactctgtttgtaaattctgtaagtggatattctgacatcgtgtggccttcgttggaaacgggatttcttcatattctgctagacagaagaattctcagtaacttccttgtgttgtgtgtattcaactcacagagttgaacgatcctttacacagagcagacttgaaacactctttttgtggaatttgcaagtggagaattcagccgctttgaggtcaatggtagaaaaggaaactatcttcgtataaagaatagacagaatgattctcagaaactcctttgtgatgtgtgcgttcaactcacagagtttaacctttcttgttcatagagcagttaggaaacactctgtttgtaaagtctgcaagtggatattcagacatccttgaggctttcgttggaaacgggatttcttcatattctgctagacaagataattctcagtaacttccttgtgttgtgtgtattcaactgacagagttgaacgttcatttagagagagcagatttgaaacactgtttttgtggaatttgcaattggagatttcaagcgctttggggccaaaggcagaaaaggaaatatcttcgtataaaaactagacagaatcattctcagaaactgctgcgtgatgtttgcgttcaactctcagagtttaacttttcttttcattcagcggtttggaaacactctgtttgtaaagtctgcacgtggaaattttgaccacttagaggccttcgttggaaaagggtttttttcatgtaaggctagacagaagaattctcagtaacttccttgtgttgtgtgtattcaagtgtcacagttgaactttcatttaggccaagcagatttgaaacactctttttgtgcaattggcaagtgcagatttcaagcgctttaaggtcaatggcagaaaaggaaatatcttcgtttcaaaactagacagaatcattcccacaaactgcgttgtgaggtgttcgttcaactcacagagtttaacctttcttttcatagagcagttaggaaacagtctgtttgtaaattctgtaagtggatattctgacatcttgtggccttcgttggaaacgggatttcttcatattctgctagacagaataattctcagtaacttccttgtgttgtgtgtattcaactcacagagttgaaggatcctttacagagagcaggcttgaaacactctttttgtggaatttgcaagtggagatttcagccgctttgaggtcaatggtagaataggaaatatcttcctatagaaactagacagaatgattctcagaaactcctttgtgatgtgtgcgttcaactcacagagtttaacctttcttttcatagagcagttaggaaacactctgtttgtaaagtctgcaaatggatattcagacctctttgaggccttcgttggaaacgggatttcttcatattctgctagacagaagaattctcagtaacttccttgtgttgtgtgtattcaactgacagagttgaactttcatttagagagagcagatttgaaacactgtttttgtggaatttgcaagtggagatttcaagcgctttggggccaagggcagaaaaggaaatatcttcgtataaaaactagacagaagcattctcagaaactgctgcgtgatgtgtgcgttcaactctcagagtttaacttttcttttcattcagcggtttggaaacactctgtttgtaaagtctgcacgtggatattttgaccacttagaggccttcgttggaaacgggttttttgcaagtaaggctagacagaagaattctcagtaaattccttgtgttgtgtgtattcaactcacagagttgaacgatcctttacacagagcagacttgaaacactctttttgtggaatttgcaagtggagatttcagccgctttgaggtcaatggcagaaaaggaaatatcttcgtataaagactagacagaattattctcagaaactcctttgtgatatgtgcgttcaactcacagagtttaacctttcttttcatagagcagttaggaaacactctgtttgtaaagtctgcaagtggatattcagacctctttgaggccttcgttggaaacgggatttcttcatattctgctagagagaagaattctcagtaacttccttgtgttgtgtgtattcaactcacagagttcaacgatcctttacacagagcagacttgaagcactctttttgtggaatttgcgagtggagatttcagccgctttgaggtcaatggtagaataggaaatatcttcctatagaaactagacagagtgattctcagaaactcctttgtgatgtttgcgttcaactcacagagtttaacctttcttttcatagagcagttaggaaacactctgtttgtaaagtctgcaagtggatattcagacctccttgtggccttcgttggaaacgggatttcttcatattctgctatacagaagaattctcagtaacttccttgtgttgtgtgtattcaactgacagagttgaactatcatttagagagagcagatttgaaacactgtttttgtggaatttgcaagtggagatttcaagcgctttggggccaaaggcagaaaaggaaatatcttcgtataaaaactagacagaatcattctcagaaactgctgcgtgatgtgtgcgttcaactctcatagtttaacctttcttttcattcagcggtttggaaacactctgtttgtaaagtctgcacgtggatattttgaccacttagaggccttcgttggaaacgggtttttttcatgtaaggctagacagaagaattcccagtaacttccttgtgttgtgtgcattcaactcacagagatgaacattcccttagacacagcagatttgaaacactgtatttgtgtaatttgcaagtgtagattaaaagcgctttaaggtcaatggcagaaaaggaaatatcttcgtttcaaaactagacagaatcattcccacaaactgcgttgtgatgtgttcgttcaactcacagagtttaacctttctgctcatagagcagttaggaaacactctgtttgtaaagtctgtaagtggatattctgacctcttgtggccttcgttggaaacgggatttcttcatattctgctagacagaataattctcagtaacttccttgtgttgcgtgtattcaactcacagagttgaacgatcctttacagagagcagacttgaaacactctttttgtggaatttgcaagtggagatttcagccgctttgaggtcaatgatagaataagaaatatcttcctatagaaactagacagaatgattctcagaaactcctttgtgatgtgtgcgttcaactcacagagttcaaactttcttttcatagagcagttgggaaacactctgtttgtaaagtctgcaagtggatattcagacttctttgaggccttcgttggaagcgggatttcttcatattctgctagacagaagaattctcagtaacttccttgtgttgtgtgtattcaactgacagagctgaactttcatttagagagagcagatttgaaacactgtttttgtggaatttgcaagtggagatttcaagcgctttggggccaaaggcagaaaaggaaatatcttcgtataaaaactagacagaatcattctcagaaactgctctgcgatgtgtgcgttcaactctcagagtttaacttttcttttcattcagcagtttggaaacactgtgtttgtaaagtctgcacgtggatattttgaccacttagaggccttcgttggaaacgggtttttttcctgtaaggctagagagaagaattcccagtaacttccttgtgttgtgtacattcaactcacagagttgaacgttcccttagacagagcagatttgaaacactctttttgtgcaattggcaagtgctgatttcagccgctttgaagtcaatggtagaaaaggaaatatcttcgtataaaaactagacagaatcattcccacaaactgcgttgtgatgtgttcgttcaactcacagcagtttaacctttctgttcatagagcagttaggaaacactctgtttgtaaagtctgtaagtggatattctgacatcttgtggccttcgttggaaacgggatttcttcattttctgctagacagaagaattctcagaaacttccttgtgttgtgtgttctcaactcacagagttgaacgatgctttacacagagtagacttgaaacactctttttgtgtaatttgcaagtggagatttcagccgctttgaggtcaatggtagaaaaggaaatatcttcgtataaaaactagacagaatgattctcagaaactcctttgtgatgtgtgcattcaactcacagagtttaacttttcttttcatagagcagttaggaaacactctgtttgtaaagtctgcaagaggatattcagacctctttgaggccttcgttggaaacgggtttttttcatataaggctagacagaagaattcccagtaacttccttgtgttgtgtgtgttcaactcacagagttgaactttcatttacacagagcagatttgaaacactctttttgtggaatttgcaaatggaggtttgaagcgctttgaggccaaaggcagaaaaggaaatatcttcgtataaaaactagacagaatcattctcagaaactgctctgcgatgtgtgcgttcaactctcagagtttaacttttctttacattcagcagtttgggaacactctgtttgtaaagtctgcacgtggatattttgaccacttagaggccttcgttggaaacgggtttttttcctgtaaggctagacagaagaattctcagtaacttccttgtgttgtgtgtattcaactcacagagttgaacgatcctttacagagagcagacttgaaacactctttttgtggaatttgcaagtggagatttcagccgctttgaggtcaatagtagaaaaggaaatatcttcgtataaagactagacagaatgattctcagaaactcctttgtgatgtgtgcgttcaacacacagattttaacttttcttttcatacagcagttaggaaacactctgtttgtaaagtctgcaagtggatattcagacctctttgaggccttcgttggaaacgggatttcttaatattatgctagacagaataattctcagtaaattccttgtgctgtgtgtattcaactcacagagttgaacgatcctttacagagagcagacttgaaacactctttttgtggaatttgcaagtggagatttcagcctcttggaggtcaatggtagaataggaaatatcttcctatagaaactagacagaatgattctcagaaactcctttgtgatgtgtgcgttcaactcacagagtttaacctttcttttcatagagcagttcaggaaacactctgtttgtaaagtctgcaagtggatattcagacttctttgaggccttcgttggaaacgggatttcttcatattctgctagacagaagaattctcagtaacttccttgtgttgtgtgtattcaactcacggagttgaatgatcctttacacagagcagacttgaaacactctttttgtggaatttgcaagtggagatttcagccgctttgaggtcaatagtagaaaaggaaatatcttcgtagaaaaactagacagaatcattctcagaaactgctctgcgatgtgtgcgttcaactctcagagtttaactttgtttttcattcagcagtttggaaacactctgtttgtaaagtctgcacgtggataatttgaccacttagaggccttcgttggaaacgggtttttttcatgtaaggctagacagaagaattcccagtaacttccttgtgttgtgtgcattcaactcacagagttgaacgttcccttagacagagcagatttgaaacactctatttgtgcaatttgcaagtgtagttttcaagctctttaaggtcaacggcagaaaaggaaatatcttcgtttcaaaactagacagaatcattcccaaaaactgcgttgtgatgtgttggttcaactcacagagtttaacctttctgttcatagagcagttaggaaacactctgtttgtaaagtctgtaagtggatattctgacatcctgtggccttcgttggaaacgggatttcttcatattctgctagacagaagaattctcagtaacttccttgtgttgtgtgtattcaactcacagagttgaacgatcctttacacagagcggacttgaaacactctttttgtggaatttgcaagtggagattttagccgatttgaggtcaatggtagaataggaaatatcttcctatagaaactagacagaatgattctcataaactcctttgtgatgtgtgcgttcaactcacagagtttaacttttcttttcatagagcagttaggaaacactctgtttgtaaagtctgcaagtggatattcagacctctttgaggccttcgttggaaacgggatttcttcatattatggtagacagaataattctcagtaacttccttgtgttgtgtgtattccactcacagagttgaacgatcctttacagagagcagacttgaaacactctttttgtggaatttgcaagtggagatttcagccgctttgaggtcaatggtagaaaaggaaatatcttcgtataaagactagacagaatcattctcagaaactgctctgcaatgtgtgcgttcaactctcagagtttaacttttcttttcattcagcagtttggaaacactctgtttgtaaagtctgcacgtggatattttgaccacttagaagccttggttggaaacgggtttttttcctgtaaggctagacagaagaattcccagtaacttccttgtgttgtgtacattcaactcacagagttgaacgttcccttagacagagcagatttgaaacactctttttgtgcaattggcaaatggagatttcaagcgctttaaggtcaatggcagaaaaggaaatatctccgtttcaaaactagacagaatcattcccacaaactgcgttgtgatgtgttcgttcaactcacagagtttaacctttcttttcatagagcagttaggaaacagtctgtttgtcaattctgtaagtggatattctgacatcttgtggccttcgttggaaacgggatttcttcatattctcctagacagaagaattctcagtaacttccttgtgttgtgtgtattcaactcacagagttgaacgaccctttacacagagcagattacaaacactctttttgtggaatttgcaagtggagatttcagccgctttgaggtcaatggtagaaaaggaaatatcttcgtacaaaaactagacagaatgtttctcagaaacttctttgtgatgtgtgcgttcaactcacagagtttcacctttcttttcatagagcagttaggaaacactctgtttgtaaactctgcaagtggatattcagacctctttgaggccttcgttggtaacgggatttcttcatactgtgctacacagaagaattctcagtaacttccttgtgttgtgtgtattcaactgacagagttgaactttcatttagagagagcagatttgaagcactgtttttgtggaatttgcaagtggagacttcaagcgctttggggccaaaggcagaaaaggaaataccttcgtataaaaactagacagaatcattctcagaaactgctctgcgatgtgtgcgttcaactctcagagtttaacttttcttttcattcagcagtttggaaacactctgtttgtaaagtctgcacgtggataatttgaccacttagaggccttcgttggaaacggttttttttcatgtaaggctagacagaagaattcccagtaacttccttgtgttgtgtgcattcaactcacagagatgaacgttcccttagacagagcagatgtgaaacactcaatttgtgcaatttgcaagtgtagatttcaagcactttaaggtcaatggcataaaaggaaatatcttcgtttcaaaactagacagaatgattctcatgaactcctttgtgatgtgtgcgttgaactcacagagtttaacctttcttttcatagagcagttaggaaacactctgtttgtaaagtctgcaagtggatattcagacctccttgaggccttcgttggaaacgggctttcttcatattctgctagacagaagaattctcagtaacttccttgtgttgtgtttattcaactcacagatttgaatgatcctttacacagagcagacttgaaacactctttttgtgtaatttgcaagtggagatttcagccgatttgaagtcaatggtagaaaagtaaatatcttcgtataaagactagacagaatgattctcagaaacttctttgtgatgtgtgtgttcaactcacagagtttaacctttcttttcatagagcagttaggaaacactgtgtttttaaactctgcaagtggatattcagacctctttgaggccttcgttggaaacgggatttcttcatactgtgctagacagaagaattctcagtaacttccttgtgttgtgtgtattcaactcacagagttgaacgatcctttacacagagcagacttgaaacactctttttgtggaatttgcaagtggagatttcagccgccttgaggtcaatggtagaaaaggaaatatcttcgtataaaaactagacagaatcattctcagaaactgctctgcgatgtgtgcgttcaattctcagagtttaacttttcttttcattcaacagtttggaaacactctgtttgtaaagtctgcacgtggatattttgaccacttagaggccttcgttggaaacgggtttctttcctgtaaggctagacagaataattctcagtaacttccttgtgttgtgtgtattcaactcacagagttgaaggatcctttacagagagcaggcttgaaacactctttttgtcgaatttgcaagtggaggtttcagccgctttgaggtcaatggtagaataggaaatatcttcttatagaaactagacaaaatgattctcatgaactcctttgtgatgtgtgcgttcaactcacagagtttaacctttcttttcatagagcagttaggaaacactctgtttgtaaagtctgcaagtggatatttagacctccttgaggccttcgttggaaacgggatttcttcatattctgctagacagaagaattctcagtaacttccttgtgttgtgtttattcaactcacagagttgaatgatcctttacacagagcagacttcaaacactctttttgtggaatttgcaagtggagatttcagccgctttgaggtcaatggtagaaaagtaaatatcttcgtataaagactagacagaatgattctcagaaactcctttgtgatgtgtgcgttcaactcacagagtttaacctttcttttcatagagcagttgggaaacactctgtttgtaaagtctgcaagtggatattcagacttctttgaggccttcgttggaagcgggatttcttcatattctgctagacagaagaattctcagtaacttccttgcgttgtgtgtattcaactcacagagttgaacgatcctttacacagagcagacttgaaacactctttttgtggaatttgcaagtggagatttcagccgctttgaggtcaatggtagaataggaaatatcttcctatagaaactagacagaatcattctcagaaactgctgcgtgatgtgtgcgttcaactctcagagtttaacttttcttttcattcagcgctttggaaacactctgtttgtaaagtctgcacgtggatattttgaccacttagaggccttcgttggaaacgggtttttttcatgtaaggctagacagaaaaattcccagtaacttccttgtgttgtgtgcattcaactcacagagttgaacgttcccttagacagagcagatttgaaacactctatttgtgcaatttgcaagtgtagatttcaagcgctttaaggtcaacggcagaaaaggaaatatcttcgttttaaaactagacagaatcattcccacaaactgtgttgtgatgtgttcgttcaactcacagagtttaacctttcttttcatagagcagttaggaaacagtctgtttgtcaattctgtaagtggatattctgacatcttgtggccttcgttggaaacgggatttcttcatattctgctagacagaagaattctcagtaacttccttgtgttgtgtgtattcaactcacagagttgaacgatcctttaaacagagcagacttgaaacactctttttctggaatttgcaagtggagatttcagccgctttgaggtcaatgttagaataggaaatatcttcctatagaaactagacagaatgattctcagaaactcctttgtgatgtgtgcgttcaactcacagagttcaaactttcttttcatagagcagttgggaaaaactctgtttgtaaagtctgcaagtggatattcagacttctttgaggccttcgttggaagcggggtttcttcatattctgctagacagaagaattctcagtaacttcccttgtgttgtgtgtattcaactgacagagttgaactttcatttagagagagcagatttgaaacactgtttttgtggaatttgcaagtggagatttcaaacgctttggggccaaaggcagaaaaggaaatatcttcgtataaaaactagacagaatcattctcagaaactgctctgcgatgtgtgcattcaactctcagagtttaacttttcttttcattcagcagtttggaaacactctgtttgtaaagtctgcacgtggataacttgaccacttagaggccttcgttggaaacgggtttttttcatgtaaggctagacagaagaattcccagtaacttccttgtgttgtgtgcattcaactcacagagttgaacgttcccttagacagagcagatttgaaacactctatttgtgcaatttccaagtgtagatttcaagcgctttaaggtcaacggcagaaaaggaaatatcttcgtttcaaaactagacagaatgattctgagaaactcctttgtgatgtgtgcgttcaactcccacagtttaacctttcttttcatagagcagttaggaaacactctgtttgtaaagtctgcaagtggatattcaggacctccttgaggccttcgttggaaacgggatttcttcatattatgctagacagaagaattctcagtaacttccttgtgttgtgtgtattcaactcacagagttgaacgatcctttacacagagcagacttgaaacactctttctgtggaatttgcaagtggagatttcaggcgctttgaggtcaatagtagaaaaggaaatatcttcgtagaaaaactagacagaatgattctcagaaactcctttgtgatgtgtgtgttcaactcacagagtttaacctttcttttcatagagcagttagtaaacagtctgtttataaagtctgcaagtggatattcagacccctttgaggccttcgttggaaacgggatttcttcatattatgctagacagaagaattctcagtaacttccttgtgttgtgtgtattcaactgacggagttgaactatcatttagagagagcagatttgaaacactgtttttgtggaatttgcaagtggagatttcaagcgctttggggccaaaggcagaaaaggaaatatcttcgtataaaaactagacagaatcattctcagaaactgctctgcgatgtgtgcgttcaactctcagagtttaacttttcttttcattcagcagtttggaaacactctgtttgtaaagtctgcatgtggatattttgaccacttagaggccttcgttggaaacgggtttttttcctgtaaggctagacagaagaattcccagtaacttccttgtgttgtgtacattcaactcacagagttgaacgttcccttagacagagcagatttgaaacactctttttgtgcaattggcaaatggagatttcaagcgcttgaaggtcaatggcagaaaaggaaatatcttcgtttcaaaactagacagaatcattcccacaaactgcgttgtgatgtgtgcgttcaactcaaagagtttaacctttcttttcatagagcagttaggaaacactctgtttgtaaagtctgcaagtggatattcagacctccttgaggccttcgttggaaacgggatttcttcatattctgctagacagaataattctcagtaacttcattgtgttgtgtgtattcaactcacagagttgaaggatcctttacagagagcaggcttgaaacactctttttgtcgaatttgcaagtggagatttcagccgctttgaggtcaatggtagaataggaaatatcttcttatagaaactagacagaatgattctcagaaactcctttgtgatgtgtgtgttcaactcacagagtttaacctttcttttcatagagcagttagtaaacactctgtttataaagtctgcaagtggatattcagacccctttgaggccttcgttggaaacgggatttcgtcatattatgctagacagaagaattctcagtaacttccttgtgttgtgtgtattcaactcacagagttgaacgatcctttacacagagcagattagaaacactctttttgtggaatttgcaggtggagatttcagccgctttgaggtcaatagtagaaaagggaatatcttcgtataaaaactagacagaaatcattctcagaaactgctctgcgatgtgtgcgttcaactctcaggagtttaacttttcttttcattcagcagtttggaaacactctgtttgtaaagtctgcacgtggatattttgaccacttagaggccttcgttggaaacgggtttttttcctgtaaggctagacagaagaattcccagtaacttccttgtgttgtgtacattcaactcacagagttgaacgttcccttagacagagcagatttgaaacactctttttgtgcaattggcaaatggagatttcaagcgctttaagttcaatggcagaaaaggaaatatcttcgtttcaaaagtagacagaatgattctcagaaactcctttgtgatgtgtgcgtgcaactcacagagtttaacttttcttttcatagagcagttaggaaacactctgtttgtaaagtctgtaagtggatattctgacatcttgtggccttcgttggaaacgggatttcttcatattctgctagacagaagagttctcagtaacttccttgtgttgtgtgtattcaactcacagagttgaacgatcctttacacagagcagacttgaaacactctttttgtggaatttgcaagtggagatttcagccgctttgaggtcaatagtagaaaaggaaatatcttcgtagaaaaactagacagagtgattctcagaaactcctttgtgatgtctgcgttcaactcacagagtttaacgtttcttttcatagagcagttaggaaacactctgattgtaaagtctgcaagtggatattcagacctccttgaggccttcgttggatacgggatttcttcatattctgctatacagaagaattctcagtaacttccttgtgttgtgtgtattcaactgacatagctgaactttcatttagagagagcagatttgaaacactgtttttgtggaatttgcaagtggagatttcaagcgctttggggccaaaggcagaaaaggaaatatcttcgtataaaaactagacagaatcattctcagaaactgctgcgtgatgtgtgcgttcaactctcagagtttaacttttcttttcattcagcggtttggaaacactctgtttgtaaagtctgcacgtgggtattttgaccacttagaggccttcgttggaaacgggtttttttcatgtaaggatagacagaagaattcccagtaacttccttgtgttgtgtgcattcaactcacagagttgaacgttcccttagacagagcagatttgaaacactctatttgtgcaatttgcaagtgtagatttcaagcgctttaaggtcaacggcagaaaaggaaatatcttcgtttcaaaactagacagaatcattcccacaaactgcgttgtgatctgttcgttcaactcacagagtttaacctttctgttcatagagcagttaggaaacactctgtttgtaaagtctgtaagtggatattctgacatcttgtggccttcgttggaaacgggatttcttcatattctgctagacagaagaattctcagaaacttccttgtgttgtgtgttttcaactcacagagttgaacgatgctttacacagagcagacttgaaacactcattttgtggaatttgcaaggggagatttcagccgctttgaggtcaatggtagaataggaaatatcttcctatagaaactagccagaatgattctcagaaactcctttgtgatgtgtgcgttcaactcacggagtttaacctttcttttcatagagcagttaggaaacactctgtttgtaaagtctgcaagtggatattcagacatccttgaggctttcgttggaaacgggatttcttcatattctgctagaaagaagaattcccagtaacttccttgtgttgtgtgtgttcaactcacagagttgaactttcatttacacagagcagatttgaaacactctttttgtggaatttgcaagtggagatttcaagcgctttgagaccaaaggcagaaaaggaaatatcttcgtttcaaaacaagacagaatcattctcagaaactgctgcgtgatgtgtgcgttcaactctcagagtttaacttttcttttcattcagcggtttggaaacactctgtttgtaaagtctgcacgtggaaattttgaccacttagaggccttcgttggaaacgggattttttcatgtaaggctagacagaagaattcccagtaacttccttgtgttgtgtgcattcaactcacagagttgaacgttccttagacacagcagatttgaaacactctatttgtgcaatttgcaagtgtagatttcaagcgctttaaggtcaatggcagaaaaggaaatatcttcgtttcaaaactagacagaatcattcccacaaactgcgttgtgatgtgttcgttcaactcacagagtttaacctttcttttcatagagcagtgaggaaacagtctgtttgtcaattctgtaagtggatattctgacatcttgtggccttcgttggaaactggatttcttcatattctgctagacagaataattctcagtaacttccttgtgttgtgtgtattcaactcacagagttgaacgatcctttacacagagcagacttgaaacactctttttgtgggatttgcaagtggagatttcagccgctttgaggtcaatggtagaataggaaatatcttcctatagaaactagacagaatgattctcagaaactcctttgtgatgtgtgtgttcaactcacagagtttaacctttcttttcatagagcagttaggaaacactctgtttgtaaagtctgcaagtggatattcagacctcgttgaggccttcgttggaaacgggatttcttcatattctgctagacagaagaattcccagctaacttccatgtgttgtgtgtgttcaactcacagagttgaactttcatttacacagagcagatttgaaacactctttttgtggaatttgcaaatggagatttcaagcgctttgaggccaaaggcagaaaaggaaatatcttcgtataaaaactagacagaaatcattctcagtaaactgctgcgtgatgtgtgcgttcaactctcagagtttaacttttcttttcattcagcggtttggaaacactctgtttgtaaagtctgcacgtggaaattttgaccacttagaggccttcgttggaaacgggtttttttcatgtaaggctagacagaagaattctcagtaacttccttgtgttgtgtgtattcaactcacagagttgaacgatcctttacacagagcagacttgaaacactctttttgtggaatttgcaagtggagatttcagccgctttgaggtcaatggtagaaaaggaaatatcctcgtatagaaacaagacagaatgattctcagaaactcctttgtgatgtttgcgttcaactcacagagtttaacctttcttttcatagagcagttaggaaacacactgtttataaagtctgcaagtggatattcagacctccttgaggccttcgttggaaacgggatttcttcatattctgctagacagaagaattcccagtaacttccttgtgttgtgtgtattcaactcacagagttgaacgatcctttacacagagcagacttgaaacactctttttgttgaatttgcaagtggagatttcagccgctttgaggtcaatggtagaataggaaatatcttcctatagaaactagacagaatgattctcagaaactcgtttgtgatgtgtgtgttcaactcacagagtttaacctttcttttcatagagccgttagtaaacactctgtttataaagtctgcatgtggatattcagacccctttgaggccttcgttggaaacgggatttcttcatattatgctagacagaagatttctaagtaacttccttgtgttgtgtgtattcaactgacagagtttaactttcatttagagagagcagatttgaaacactgttttcgtggaatttgcaattggagatttcaagcgctttggggccaaaggcagaaaaggaaatatcttcgtataaaaactagacagaatcattctcagaaactgctctgcgatgtgtgcgttcaactctcagagtttaacttttcttttcattcagcagtttggaaacactctgtttctaaagtctgcacgtggataatttgaccacttagaggccttcgttggaaacgggtttttttcatgtaaggctagacagaagaattcccagtaacttccttgtgttgtgtgcattcaactcacagagatgaacattcccttagacagagcagatttgaaacactctatttgtgtaatttgcaagtgtagatttcaagcgatttaaggtcaatggccgaaaaggagatatcttcgtttcaaaactagacagaatgattctctgaaactcctttgtgatgtgtgcgttcaactcacagagtttaacctttcttttcatagagcagttaggaaacactctgtttgaaaagtctgcaagtggatattcagacctctttgaggccttcgttggaaacgggatttcttcatattatgctagacagaagaattctcagtaacttccttgtgttgtgtgtattcaactcacagagttgaacgatcctttacacagagcagacttgaaacactctttttgtggaatttgcaatttgagattacagccgctttgaggtcaatagtagaaaaggaaatatcttcgtagaaaaactagacagaatgattctcagaaactcctttatgatgtgtgtgttcaactcacagagtttaacctttcttttcatagagcagttagtaaacactctgtttataaagtctgcaagtggatattcagatccctttgtggccttcgttggaaacgggatttcttcatattatgctagacagaagaattcccagtaacttcccttgtgttgtgtgtgttcaactcacagagttgaactttgatttacacagagcagatttgaaacactctttttgtggaatttgcaagtggagatttcaagcgctttgaggccaaaggcagaaaaggaaatatcttcgtataaaaactagacagaatcattctcagaaactgctgcgtgatgtgtgcgttcaactctcagagtttaacttttcttttcattcagcggtttggaaacactctgtttgtaaagtctgcaagtggatattttgaccacttagaggccttcgttggaaacgggtttttttcacgtaaggctagacagaagaattcccagtaacttccttgtgttgtgtgcattcaactcacagagttgaacgttcccttagacagagcagatttgaaacactctatttgtgcaattggcaagtgtagatttcaagcgctttaaggtcaatggcagaaaaggaaatatcgtcgttacaaaactagacagaatgattctcagaaacttctttgtgatgtgtgcgttcaactcacagagtttaacctttcttttcatagagcagttaggaaacagtctgtttgtcaattctgtaagtggatattctgacatcttgtggccttcgttggaaacgggatttcttcatattctgctagacagaagaattctcagtaacttccttgtgttgtgtgtattcaactcacaggagttgaacgatcctttacacagagcagacttgaaacactctttttgtggaatttgcaagtggagatttcagccgctttgaggtcaatggtagaaaaggaaatatcttcgtataaaaactagacagaatgattctcagaaactcctttgtgatgtgtgtgttcaactcacagagtttaacctttcttttcatagagcagttagtaaacactctgtttataaagtctgcaagtggatattcaaacccctttgaggccttcgttggaaacgggatttcttcatattctgctagacagaaggattcccagtaacttccttgtgttgtgtgtgttcaactcacagagttgaactttcatttacaaagagcagatttgaaacactctttttgtggaatttgcaagtggagatttcaagcgctttgaggccaaaggcagaaaaggaaatatcttcgtataaaaactagacagaatcattctcagaaactgctctgcgatgtgtgcgttcaactctcagattttaacttttctattcattcagcagtttggaaacactctgtttgtaacgtctgcacgtggataatttgaccacttagaggccttcgttggaaacgggtttttttcatgtaaggctagacagaagaattctcagtaacttccttgtgttgtgtgcattcaactcaaagagttgaacgttcccttagacagagcagatttgaaacactctacttgtgcaatttgcaagtgtagatttcaagcgctttaaggtcaatgacagaaaaggaaatatcttcgtttcaaaactagacagaatcattcccagaaactgcgttgtcatgtgttcgttcaactcacagagtttaacctttctgttcatagagcagttaggaaacactctgtaaagtttgtaagtggatattctgacatcttgtggccttcgttggaaacgggatttcttcatattctgctagacagaagaattctcagtaacttccttgtgttgtgtgtattcaactcacagagttgaacgatccttttcacagagcagacttgaaacactctttttgtggaatttgcaagtggagatttcagccgctttgaggtcaatggtagaaaaggaaatatcttcgtataaagactagactgaaagattctcagaaactcctttgtgatgtgtgtgttcaactcacagagtttaacatttcttttcgtagtgcagttagtaaacactctgtttataaagtctgcaagtggatattcagacccctttgaggccttcgttggaaacgggatttcttcatattctgctagacagaagaattctcagtaacttccttgtgttgggtgtattcaactgacagagttgaactttcatttagagagagcagatttgaaacactgtttttgtggaatttgcaagtggagatttcaagcgctttggggccaaaggcagaaaaggaaatatcttcgtataaaaactagacagaatcattctcagaaactgctgcgtgatgtgtgcgttcaactctcagagtttaacttttcttttcattcagcggtttggaaacactctgtttgtaaagtctgcacgttgatattttgaccacttagaggccttcgttggaaacgggtttttttcatataaggctagatagaagaattcccagtaacttccttgtgttgtgtgcattcaactcacagagttgaacgttcccttagacagagcagatttgaaacactctatttgtgcaatttgcaagtgtagatttcaagtgtttaaggtcaatggcagaaaaggaaatatcttcgtttcaaaactagacagaatcattcccacaaactgcgttgtgatgtgttctttcaactcacagagtttaacctttctgttcatagagcagttaggaaacactctgtttgtaaagtctgtaagtggatattctgacatcttgtggccttcgttggaaacgggatttcttcatattctgctagacagaagaattctcagtaacttccttgtgttgtgtgtattcaactcacagagttgaacgaccctttacacagagcagacttgtaacactctttttgtggaatttgcaagtggagatttcagccactttgaagtcaaaggtagaaaaggaaataacttcctataaaaactagacagaatgattctcagaaactcctttgtgatgtgtgcgttcaactcacagagtttaacctttcttttcatagagcagttaggaaacactctgtttgtaaagtctgcaagtggatattcagacctctttgaggccttcgttggaaatgggtttttttcatataaggctagacagaagaattcccagtaacttcccttgtgttgtgtgtgttcaactcacagagttgaactttcatttacacagagcagatttgaaacactctttttgtggaatttgcaaatggagatttcaagcgctttgaggccaaaggcagaaaaggaaatatcttcgtataaaaactagacagaatcgttctcagaaactgctctgcgatgtgtgcgttcaactctcagagtttaacttttcttttcattcagcagtttggaaacactctgtttgtaaagtctgcatgtggataatttgaccacttagaggccttcgttggaaacgggtttttttcatgtaaggctagacagaagaattcccaataacttccttgtgttgtgtgcattcaactcacagagttgaacgttcttttagacagagcagatcggaaacaatctttttgtgcaatttgcaggtggagatttcaagcgctttaaggtcaatggcagaaaaagatatatatcttcatttcaaaactagacagaatcattcccacaaactgcgttctgatgtgttcgttcaactcacagagtttaacctttcttttcatagagcagttaggaaacagtctgtttgtcaattctgtaagtggatattctgacatcttgtggccttcgttggaaacgggatttcttcatattctgctagacagaagaattctcagtaacttccgcgtgttgtgtgtattcaactcacagagttgaacgatcctttacacagagcagagttgaaacactctttttgtggaatttgcaagtggagatttcagccgctttgaggtcaatggtagaaaaggaaatatcttcgtataaaaactagacagagatgattctcagaactcctttgtgatgtgtgcgttcaactcacagagtttaacctttcttttcatagagcagttaggaaacactctgtttgtaaagtctgcaagtggatattcagacctctttgaggccttcgttggaaacgggtttttttcctataaggctagacagagaattctcagtaacttccttgtgttgtgtgtattcaactgacagagttgaactttcatttagagagagctgatttgaaacactgtttttgtggaatttgcaagtggagatatcaagcgctttggggccaaaggcagaaaaggaaatatcttcgtataaaaactagacagaatcattctcagaaactgctgcgtgatgtgtgcgttcaactctcagagtttaacttttcttttcattcagcggtttggaaacactctgtttgtaaagactgcacgtggatattttgaccacttagaggccttcgttggaaacgggttttttttcatgtaaggctagacagaagaattcccagtaacttccttgtgttgtgtgcattcaactcacagagttgaacgttcccttagacagagcagatttgaaacactctatttgtgcaatttgcaagtgtagttttcaagctctttaaggtcaacggcagaaaaggaaatatcttcgtttcaaaactagacagaatcattcccagaaactgcgttgtgatgtgttcgttcaactcacagagtttaacctttcttttcatagagcagttaggaaacagtctgtttgtcaattctgtaagtggatattctgacatcttgtggccttcgttggaaacgggatttcttcatattctgctagacagaagaattctcagtaacttccttgtgttgtgtgtattctactcacagagttgaacgatcctttacacagagcagacttgaaacactctttttgtggaatttgcaagtggagatttcagccgctttgaggtcaatggtagaataggaaatatcttcctatagaaactagacagaacgattctcagaaactcctttgtgatgtgtgcgttcaactcacagagtttaacttttcttttcatagagcagttaggaaacactctgtttgtaaagtctgcaagtggatattcagacctctttgaggccttcgttggaaacgggatttcttcatattctgctagacagaagaattctcagtaacttccttgtgttgtgtgtattcaactgacagagttgaactttcatttagagagagcagatttgaaacactgtttttgtggaatttgcaagtggtgacttcaagcgctttggggccaaacgcagaaaaggaaatatcttcgtataaaaactagacagaatcattctcagaaactgctgcgtgatgtgtgcgttcaactctcagactttaacttttcttttcattcagcggtttggaaacactctgtttgtaaagtctgcacgtggatattttgaccacttagaggccttcgttggaaacgggtttttttcatataaggctagacagaagaattcccaggaacttccttgtgttgtgcacattcaactcacagagttgaacgttcccttagacagagcagatttgaaacactctttttgtgcaattggcaagtggtgatttcagccgctttgaggtcaatggtagaaaaggaaatatcttcgtataaaaactagacagaatcattcccacaaactgcgttgtgatgtgttcgttcaactcacagagtttaacctttcttttcatagagcagttaggaaacactctgtttgtaaattctgtaagtggatattctgacatcttttggccttcgttggaaacgggatttcttcatattctgctagacagaagaattctcagaatcttccttgtgttgtgtgtcttcaactcacagagttgaacgttggtttacacagagcagatttgaaacactctttttgtggaatttgcaagtggagatttcagccgctttgaggtcaatggtagaaaaggaaatgtcttcgtataaaaactagacagaatgattctcagaaactcctttgtgatgtgtgcgttcaactcacagagtttaacctttcttttcatagagcagttaggaaacactgtgtttgtaaagtctgcaagtggatattcagacctctttgaggccttcgttggaaacgggattttttcatataaggctagacagaagaattcccagtaacttccttgtgttgtgtttgttcaactcacagagttgaactttcatttacccagagcagatttgaaacactctttttgtggaatttgcaagtggagatttcaagcgctttgaggccaaaggcagaaaaggaaatatcttcgtttcaaaactagacagaatcattctcagaaactgctctgcgatgtgtgcgttcaactctcagagtttaacttttcttttcattcagcagtttggaaacactctgtaaagtctgcacgtggatattttgaccatttagaggctttcgttggaaacgggtttttttcttgtaaggctagacagaagaattcccagtaacttccttgtgttgtgtgcattcaactcacagagttgaacgttcccttagacagagcagatttgaaacactctatttgtgcaatttgcaagtgtagatttcaagcgctttaaggtcaatggcagaaaaggaaatttcttcgttttaaaactagacagaatgattctcagaaaatcttttgtgatgtgtgcgttcaactcacagagtgtaacttttcttctcatagagcagttaggaaacactctgtttgtaaagtctgcaagtggatattcagacctctttgaggtcttcgttggaaacgggatttcttcatattatgctagacagaagaattctcagtaacttccttgtgttgtgtgtattcaactcaccgagttgaacgatcctttacacagagcagacttgaaagactctttttgtggaatttgcaagtggagatttcagccgctttgaggtcaatggcagaaaaggaaatatcttcctatagaaactagacagaatgattctcagaaacttctttgtgatgtgtgcgttcaactcacagagtttaacctttcttttcatggagcagttaggaaacactctgtttgtaaactctgcaagtggatattcagacctctttgaggccttcgttggaaacgggatttcttcatactgtgctagacagaagaattcccagtaacttccttgtgttgtgtgtgttcaactcacagagttgaactttcatttacagagagcagatttgaaacactctttttgtggaatttgcaagtggagatttcaagcgctttgaggccaaaggcagaaaaggaaatatcttcgtataaaaactagacagaatcattctcagaaactgctgcgtgatgtgtgcgttcaactctcagagtttaacttttcttttcattcagcggtttggaaacactctgtttgtaaagtctgcacgtggaaattttgaccacttagaggccttcgttggaaacgggtttttttcatgtaaggctagacagaagaattcccagtaacttcgttgtgttgtgtacattcaactcacagagttgaacgttcccttagacagagcagatttgaaacactctttttgtgcaattggcaagtggagatttcaagcgctttaaggtcaatggcagaaaaggaaatatcttcgtttcaaaactagacagaatcattcccacaaactgcgttgtgatgtgttcgttcaactcacagagtttaacctttcttttcatagagcagttaggaaacactctgttggtaaattctgtaagtggatattctgacatcttgtggccttcgttggaaacgggatttctacatattctgctagacagaagaattctcagaaacttccttgtgttgtgtgttttcaactcacagatttgaacgatgctttacaaagagtagacttgaaacactctttttgtggaatttgcaagtggagatttcagccgctttgaggtcaatggtagaataggaaatatcttcctatagaaactagacagaatgattctcagaaaatcctttgtgatgcgtgcgttcaactcacagagtttaacttttcttttcatagagcagttaggaaacactctgtaaagtctgcaagtggatattgagacccctttgaggccctcgttggaaacgtgatttcttcatattctgctagacagaagaattcccagtaacttccttgtgttgtgtgtgttcaactcacagagttgaacgttcccttagacagaggagatttgaaacactctttttgtggaatttgcaagtggagatttcaagcgctttgaggccaaaggcagaaaaggaaatatcttcgtataaaaactagacagaatcattctcagaaactgctctgtgatgtgtgcgttcaactctcagagtttaacttttcttttcattcagcagtttggaaacactctgtttgtaaagtctgcacgtggataatttgaccacttagaggccttcgttggaaacgggtttttttcatgtaaggctatacagaagaattcccagtaacttccttgtgttgtgtacattcaactcacagagttgaacgttcccttagacagaacagatttgaaacactctttttgtgcaattggcaagtggtgatttcagccgctttgaggtcaatggtagaaaaggaaatatcttcgtataaaaactagacagaatgattctcagacactcctttgtgatgtgtgcgttcaactcacagagtttaacctttcttttcatagagcagttaggaaacactctgtttgtaaagtctgcaagtggatattcagacctctttgaggccttcgttggaaacgggatttcttcatattatgctagacagaagaattctcagtaacttccttttgttgtgtgtattcaactcacagagttgaacgatcctttacacagagcagacttgaaacactctttttgtggaaattgcaagtggagatttcagccgctttgaggtcaatggtaaaaaaggaaatatcttcgtataaaaactagacagaatgattctcagaaactcctttgtgatttgtgtgttcaacccacagagtttaacatttcttttcatagagcagttaggaaacactctgtttgtaaagtctgcaagtggatattcagacctctttgaggccttcgttggaaacgggtttttttcatataaggctagacagaagaattcccagtaacttccttgtgttgtgtgtgttcaactcacagagttgaactttcatttacacagagcagatttgaaacactctttttgtggaatttgcaagtggagatttcaagcgctttgaggccaaaggcagaaaaggaaatatcttcgtttccaaactagacagaatcattctcagaaactgctctgtgatgtgtgcgttcaactctcagagtttaacttttcttttcattcagcagtttggaaacactctgtttctaaagtctgcacgtggataatttgaccacttagaggccttcgttggaaacgggtttttttcatgtaaggctagacagaagaattcccagtaacttccttgtgttgtgtgcattcaactcacagagttgaacgttcccttagacagagcagatttgaaacagcctatttgtgcaatttgcaagtgtagatttcaagctctttaaggtcaacggcagaaaaggaaatatcttcgtttcaaaactagacagaattattcccacaaactgcgatgtgatgtgttcggtcaactcacagagtttaacctttctgttcatagagcagttaggaaacactctgtttgtaaagtctgtaagtggatattatgacatcatgtggccttctttggaaacgggatttcttcatattatgctagacagaagaattctcagtaacttccttgtgttgtgtgtattcaactcacagagttgaaccatcctttacacagagcagacttgaaacactctttttgtggaatttgcaagtggagatttcagccgctttgaggtcaatagtagaaaaggaaatatcttcgtagaaaaactagacagaatgattctcagaaactcctttgtgatgtgggtgttcaactcacagggtttaacctttcttttcatagagcagttaggaaacactctgtttgtaaagtctgcaagtggatattttcacctctttgaggccttcgttggaaacgggttttttttcatgtaaggctagacagaagaattctcagtaacttccttgtgttgtgtgtattcaactgacagagttggactttcatttagagagagcagatttgaaacactgtttttgtggaatttgcaagtggagatttcaagcgctttggggccaaaggcagaaaaggaaatatcttcgtataaaaactagacagaatcattctcagaaactgctgcgtgatgtgtgcgttcaactctcagagtttaacttttcttttcattcagcggtttggaaacactctgtttgtaaagtctgcacgtggatattttgaccacttagaggccttcgttggaaacgggtttttttcatgtaaggctagacagaaggaattcccagtaacttccttgtgttgtgtgcattcaactcacagagttgaacgttcccttagacagagcagatttgaaacactctatttgtgcaatttgcaagtgtagatttcaagcgctttaaagtcaatggcagaaaaggaaatatcttcgtttcaaaactagacagaatcattcccacaaactgcgttgtgatgtgttcgttcaactcacagagtttaacctttcttttcatagagcacttaggaaacagtctgtttgtaaattctgtaagtggatattctgacatacttgtggccttcgttggaaacgggatttcttcatattctgctagacagaataattctcagtaacttccttgtgttgtgtgtattcaactctcagagttgaacgatcctttacagagagcagacttgaaacactctttttgtggaatttgcaagtggagatttcagccgctttgaggtcaatggtagaataggaaatatcttcctatagaaactagacagaatgattctcagaaactcctttgtgatgtgtgcgttcaactcacagagtttaacctttcttttcatagagcagttaggaaacactctgtttgtaaagtctgcaagtggatattcagacctctttgaggccttcgttggaaacgggtttttttcatgtaaggctagacagaagaattcccagtaacttccttgtgttgtgtgtgttcaactcacagagttgaactttcatttacacagagcagatttgaaacactctttttgtggaatttgcaagtggagattacaagcgctttgaggccaaaggcagaaaaggaaatatcttcgtttcaaaactagacagaataattctcagaaactgctgcgtgatgtgtgcgttcaactctcagagtttaacttttcttttcattcagcggtttggaaacactctgtttgtaaagtctgcacgtggatattttggccacttagaggccttcgttggaaacgggtttttttcatgtaaggctagacagaagaattcccagtaacttccttgtgttgtgtgcattcaactcacagagttgaacgttcccttagacagaggagatttgaaacactctatttgtgcaatttgcaagtgtagttttgaagctctttaaggtcaacggcagaaaaggaaatatcttcgtttcaaaactagacagaatcattcccacaaactgcgttgtgatgtgttcgttcaactcacagagtttaacctttctgttcatagagcagttaggaaacactctgttgtaaagtctgtaagtggatattctgacatcttgtggccttcgctggaaacgggatttcttcatattctgctagacagaagaattctcagtaacttccttgtgttgtgtgtattcaactcacagagttgaacgatcctttacacagtgcagacttcaaacactctttttgtggaatttgcaagtggagatttcagccgctttgaggtcaatggtagaaaaggaaactatcttcatataaagactagacagaatgattctcataaactcctttgtgatgtgtgcgttcaactcacagagtttaacctttcttttcatagagcagttaggaaacactctgtttgtaaagtgtgcaagtggatattcagacctccttgaggccttcgttggaaacgggatttcttcatattctgctagacagaagaattctcagtaacttccttgtgttgtgtgtattcaactcacagagttgaacgatcctttacacagagcagacttgaaacactccttttgtggaatttgcaagtggagatttcagccgctttgaggtcaatggtagaaaaggaaactatgttcttacaaagactagacagaatcattctcagaaactgctctgcgatgtctgcgttcaactctcagagtttaacttttcttttcattcagcagtttggaaacactctgtttgtaaagtctgcacgtggatattttgaccacttagaggccttcgttggaaacgggtttttttcctgtaaggctagacagaagaattcccagtaacttccttgtgttgtgtgcattcaactcacagagttgaacgttcccttagacagagcagatttgaaacactctatttgtccaatttgcaagtgtagatttcaagcgctttaaggtcaacggcagaaaaggaaatatcttcgtttcaaaactagacagaatcattcccacaaactgcgttgtgatgtgttcgttcaactcacagagtttaacttttctgttcatagagcagttaggaaacaccctgtttgtaaagtctgcaagtggatattcagacctccttgaggccttcgttggaaacgggatttcttcatattctgctagacagaagaattctcagtaacttccttttgttgtgtgtattcaactcacagagttgaacgatcctttacacagagcagacttgaaacactctttttgtggaatttgcaagtggagatttcagccgctttgagttcaatggtagaataggaaatatctttctatagaaactagacagaatgattctcagaaactcctttgtgatgtgtgcgttcaactcacagagtttaacctttcttttcatagagcagttaggaaacactctgtttgtaaagtctgcaagtggatattcagacatctttgaggctttcgttggaaacgggatttcttcatattctgctagacagaagaattctcagaaacttccttgtgttgtgcgttttcaactcacagagttgaacgatcctttacacagagcagacttgaaacactccttttgtggaatttgcaagtggagatttcagccgctttgaggtcaatgttagaataggaaatatcttcctatagaaactagacagaatcattctcagaaactgctgcgtgatgtgtgcattcaactctcagagtttaacttttcttttcattcagcggtttggaaacactctgtttgtaaagtctgcacgtggaaattttgaccacttagaggccttcgttggaaacgggtttttttcatgtaaggctagacagaagaattcccagtaacttccttgtgttgtgtgcattcaactcacagagttgaacgttcccttagacagagcagatttgaaacactctatttgtgcaatttccaagtgtagatttcaagcgctttaaggtcaacggcagaaaaggaaatatcttcgtttcaaaactagacagaatcattcccacaaactgcgttgtgaggtgttcgttcaactcacagagtttaacctttcttttcatagagcagttaagaaacagtctgtttgtaaattctgtaagtggatattctgacatcttgtggccttcgttggaaacgggatttcttcatattctgctagacagaagaattctcagaatcttccttgtgttgtgtgtattcaactcacacagttgaacgattgtttacacagagcagatttgaaacactccttttgtggaatttgcaagtggagatttcagccgctttgaggtccatggtagaaaaggaaatatcttcgtataaaaactagacagaaggattctcagaaacttcattgtgacgtgtgcgttcaactcacagagtttaacctttcttttcatagagcagttaggaaacactctgtttgtaaagtctgcaagtggatattcagacctctttgaggccttcgttggaaaagggatttcttcatactgtgctagacagaagaattctcagtaacttccttgtgttgtgtgtattcaactgacagagttgtaatttcgtttagagagagcagatttgaaacactgtttttgtggaatttgcaagtggagatttcaagcgctttggggccaaaggcagaaaaggaaatatcttcgtataaaaactagacagagtcattctcagaaactgctgtgtgatgtgtgcgttcaactctcagagtttaacttttcttttcattcagcggtttggaaacactctgtttgtaaagtctgcacgtggaaattttgaccacttagaggccttcgttggaaacgggtttttttcatgtaaggctagacagaagaattcccagtaacttccttgtgttgtgtacattcaactcacagagttgaacgttcccttagacagagcagatttgaaacactctttttgtgcgattggcaagtggagatttcaagcgctttgaggtcaatggcagaaaaggaaatatcttcgtttcaaaactagacagaatgattctcagaaactcctttgtgatgtgtgcgttcaactcacagagtttaacatttcttttcatagagcagttaggaaacactttgtttgtaaactctgcaagtggatattcagacctcattgaggccttctttggaaacgggatttcttcatactatgctagacagaagaattctcagtaacttccttgtgttgtgtgtattcaactcaaagagttgaacgatcctttacacagagcagacttgaaacactctttttgtggaatttgcaattggagatttcagccgcgttgaggtcaatggtagaaaaggaaatatcttcgtataaaaactagacagaatgattctcagaaactcctttgtgatgtgtgtgttcaactcacagagtttaacctttcttttcatagagcagttaggaaacactctgtttgtaaagtctgcaagtggatattcagacctctttggggccttcgttggaaacgggtttttttcatgtaaggctagacagaagaattctcagtaacttccttgtgttgtgtgtattcaactcacagagttgaacgatcctttacacagagcagacttgaaacactctttttgcggaatttgcaagtggagatttcagccgctttgaagtccatggtagaaaaggaaatatcttcgtataaaaactagacagaatcattctcagaaactgctctgcgatgtgtgcgttcaactctcagagtttaacttttcttttcattcagcagtttggaaacactctgtttgtaaagtctgcacgtggatattttgaccatttagaggccttcgttggaaacgggtttttttcttgtaaggctagacagaagaattcccaggaacttccttgtgttatgtacattcaactcacagagttgaacgtttccttagacagagcagatttgaaacactctttttgtgcaattggcaagtggtgatttcacccgctttgaggtcaatggtagaaaaggaaatatcttcgtataaaaactagacataatcattcccacaaactgcgttgtgatgtgttcgttcaactcacagagtttaacctttctgttcatagagcagttaggaaacactctgtttgtaaagtctgtaagtggatattctgacatcttgtggcctacgttggaaacgggatttctccatattctgctagacagaagaattctcagtaacttccttgtgttgtgtgtatttaactcacagagttgaacgatcctttacacagagcagagttgaaacactctttttgtggaatttgcaagtggagatttcagccgctttgaggtcaatggtagaaaaggaaatatcttcgtataaagactagacagaatgattctcagaaactcctttgtgatgtgtgcgttcaacacacagagtttaacttttcttttcatagagacgttagtaaacactctgtttataaagtctgcaagtggatattcagacccctttgaggccttcgttggaaacgggatttcttcatattatgctagacagaagaattccgagtaacttccttgtgttgtgtgtgttcaactcacagagttgaactttcatttacacagaggagatttgaaacactctttttgtggaatttgcaagtggagatttcaagcgctttgaggccaaaggcagaaaaggaaatatcttcgtataaaaactagacagaatcattttcagaaactgctgcgtgatgtgtgcgttcaactctcagagtttaacttttcttttcattcagcggtttggaaacactctgtttgtaaagtctgcacgtggatattttgaccacttagaggctttcgttggaaacgggtttttttcatgtaaggctagacagaagaattcccagtaacttcattgtgttgtgtgcattcaactcacagagttgaacgttcccttagacagagcagatttgaaacactctatttgtgcaatttgcaagtgtagatttcaagcgctttaaggtcaatggcagaaaaggaaatatcttcgtttcaaaactagacagaatgattctcagaacctcctttgtgatgtgtgcgttcaactcacagagtttaacctttcttttcatagagcagttaggaaacactctgtttgtaaagtctgcaagtggatattcagacctccttgaggccttcgttggaaacgggatttcttcatattatgctagacagaataattctcagtaacttccttgtgttgtgtgtattcaactcacagagttgaacgatcctttacacagagcagacttgaaacactctttttgtggaatttgcaagtggagatttcagccgctttgaggttaatggtagaaaaggaaatatcttcgtataaagactagacagaatgattctcagaaactcctttgtgatgtgtgtgttcaactcacagagtttaacctttcttttcatagagcagttaggaaacactctgtttgtaaagtctgcaagtggatattcagccctctttgaggccttcgttggaaacgggtttttttcatataaggctagacagaagaattctcagtaacttccttgtgttgtgtgtattcaactgacagagttgaactttcatttagagagagcagatttgaaacactgtttttgtggaatttgcaagtggagatttcaagcgctttgggccaaaggcagaaaaggaaatatcttcgtataaaaactagacagaatcattctcagaaactgctgcgtgatgtgtgcgttcaactctcagagtttaacttttcttttcattcagcggtttggaaacactctgtttgtaaagtctgcaagtggatattttgaccacttagaggccttcgttggaaacgggtttttttcatgtaaggctagacagaagaattcccagtaacttccttgtgttgtgtgcgttcaactcacagagttgaactttcatttacacagagcagatttgaaacactctttttgtggaatttgcaaatggagatttcaagcgctttgaggccaaaggcagaaaaggaaatgtcttcgtttcaaaactagacagaatcattcccacaaactgcgttgtgatgtgttcgttcaactcacagagtttaacctttctgttcatagagcagttaagaaacactctgtttgtaaagtctgcaagtggatattcagacctcctagaggccttcgttggaaacgggatttcttcatattctgctagacagaagaattctcagtaacttccttgggttgtgtgtattcaactcacagagttgaacgatcctttacacagagcagacttgaaacactctttttgtggaatttgcaagtggagatttcagccgctttgaggtcaatggtagaaaaggaaatatcttcgtataaagactagacattatgattctcataaactcctttgtgatgtgtgcgttcaactcacagtgtttaacctttcttttcatagagcagttaggaaacactctgtttgtaaagtctgcaagtggatattcagacctctttgaggccttcgttggaaacgggatttcttcatattctgctacacagaagaattctcagtaacttcccttgtgttgtgtgtattcaactcagagagttgaacgatcctttacacagagcagacttgaaacactctttttgtggaatttgcaattggagatttcaggcgctttgaggtcaatagtagaaaaggaaatatcttcgtagaaaaactagacagaatcattctcagaaactgctctgcgatgtgtgcgttcaactctcagagtttaacttttcttttcattcagcagtttggaaacactctgtttgtaaagtctgcacgtggatattttgaccacttagaggccttcgttggaaacggttttttttcctgtaaggctagacagaagaattcccagtaacttccttgtgttgtgtacattcaactcacagagttgaacgttcccttagacagagcagatttgaaacactctttgtgcaattggcaagtggagatttcaagcgctttaaggtcaatggcagaaaaggaaatatcttcgtttcaaaactagacagaacgattctcagaaactcctttgtgatgtgtgcgttcaactcacagagtttaacctttcttttcatagagcagttaggaaacactctgtttgtaaagtctgcaagtggatattcagacctctttgaggccttcgttggaaacgggatttcctcatattctgctagacagaagaattctcagtaacttccttgtgttgtgtgtattcaactcacagagttgaacgatcctttacacagagcagacttgaaactctctttttgtggaatttgcaagtggagatttcagccgctttgaggtcaatagtagaaaaggaaatatcttcgtagaaaaactagacagaatgattctcagaaactcctttgtgatgtgtgcgttcaactcacagagtttaacctttcttttcatagagcagttaggaaacactctgtttgaaaagtctgcaagtggatactcagacctccttgaggccttcgttggaaacgggatttcttcatattatgctagacagaagaattctcagtaacttccttgtgttgtgtgtattcaactgacagagtggaacttttatttagagagagcagatttgaaacactgtttttgtggaatttgcaagtggagatttcaagcgctatggggccaaaggcagaaaaggaaatatctttgtataaaaactagacagaatcattctcagaaactgctctgtgatgtgtgcgatcaactctcagagtttaacttttcttttcattcagcagtttggaaacactctgtttgtaaagtctgcacgtggataatttgaccacttagaggccttcattggaaacgggtttttttcatgtaaggctagacagaagagttctcagtaacttccttgtgttgtgtgtattcaactcacacagttgaacgatcctttacagagagcagacttgtaacactctttttgtggaatttgcaagtggagatttcagccgctttgaagtcaaagtagaaaaggaaatatctgcctataaaaactagacagaatcattcccacaaactgcgttgtgatgtgttcgttcaactcacagagtttaacctttgttttcatagagcagttaggaaacactctgtttgtaaagtctgtaagtggatattctgacatcttgtggccttcgttggaaacgggatttcttcatattctgctagacagagaattctcagtaacttccttgtgttgtgtgtattcaactcacagagttgaacgatcctttacacagagcagacttgaaacactctttttgtggaatttgcaagtggagatttcagccgctttgaggtcaatggtagaataggaaatatcttcctatagaaactagacagaatgattctcagaaactactttgtgatgtgtgcgttcaactcacagagtttaacctttcttttcatagagcagttaggaaacactctgtttgtaaagtctgcaagtggatattcagacctctttgaggccttcgttggaaacgggatttcttcatattctgctagacagaagaattcccagtaacttccttgtgttgtgtgtgttcaactcacggagttgaactttgatttacacagagcagatttgaaacactctttttgtggaatttgcaagtggagatttcaagcgctttgaggccaaaggcaggaaagggaatatcttcatataaaaactagacagaatcattctcagaaactgctctgcgatgtgtgcgttcaactctcagagtttaacttttcttttcattcagcagtttggaaacactctgtaaagtctgcacgtggatattttgaccacttaaaggcgttcgttggaaacgggtttttttcctgtaaggctagacagaagaattcccagtaacttccttgtgttgtgtacattcaactcacagagttgaacgttcccttagacagagcagatttgaaacactctttttgtgcaattggcaagtggagatttcaagcgctttgaggtcaatggcagaaaaggaaatatcttcgtttcaaaactagacagaatcattcccacaaactgcgttgtgatgtgttcgttcaactcacagtttaacctttctgttcatagagcagttaggaaacactctgtttgtaaagtctgtaagtggatattctgacatcttgtggccttcgttggaaacgggatttcttcatattctgctagacagaagaattctcagtaacttccttttgttgtgtgtattcaactcacagagttgaacgatcctttacacagagcagacttgaaacactctttttgtggaatttccaagtggagatttcagccgctttgaggtcaatggtagaataggaaatatcttcgtagaaaaactagacagaatgattctcagaaactcctttgtgatgtgtgcgttcaactcacagagtttaacctttcttttcatagagcagttaggaaacactctgtttgtaaagtctgcaagtggatattcagacctctttgaggccttcgttggaaacgggtttttttcatataaggttagacagaagaattcccagtaacttccttgtgttgtgtgtgttcaactcacagagttgaactttcatttacacagagcagatttgaaacactcttttagtggaatttgcaaatggagatttcaagcgctttgaggccaaaggcagaaaaggaaatatcttcgtataaaaactagacagaatcattctcagaaactgctgcgtgatgtgtgcgttcaactctcagagtttaacttttcttttcattcagcggtttggaaacactctgtttgtaaagtctgcacgtggatattttgacaacttagaggccttcgttggaaacgggtttttttcatgtaaggctagacagaagaattctcagtaacttccttgtgttgtgtgtattcaactcacagagttgaacgatcctttacacagagcagacttgtaacactctttttgtggaatttgcaagtggagatttcagccgctttcaagtcaaaggtcgaaaaggaaatatcttcctataaaaactagacagaatgattctcagaaactcctttgtgatgtgtgcgttcaactcacagagtttaacctttctgttcatagagctgttaggaaacactctgtttgtaaagtctgcaagtggatattcagaactccttgaggccttcgttggaaacgggatttcttcatattctgctagacagaagaattctcagtaacttccttgtgttgtgtgtattcaactcacagagttgaacaatcctttacacagagcagacttgaaacactctttttgtggaatttgcaagtggagatttcagccgctttgaggtcaatggtagaaaaggaaacatctccgtataaagactagacagaatgattctcagaaactcctttgtgatgtgtgcgttcaactcaaagagtttaacctttcttttcatagagcagttaggaaacactctgtttgtaaagtctgcaagtggatattcagacatccttgaggctttctttggaaacgggatttcttcatattctgctagaaagaagaattctcagaaacttccttgtgttgtgtgttttcaactcacagagatgaacgatcctttacacagagcagacttgaaacactccttttgtggaatttgcaagtggagatttcagccgctttgaggtcaatggtagaataggaaatatcttcctatagaaagtagacagaatcattctcagaaactgctctgcgatgtgtgcgttcaactctcagagtttaacttttcttttcattcagcagtttggaaacactctgtttgtaaagtctgcacgttgataatttgaccacttagaggccttcgttggaaacgggtttttttcatataaggctagacagaagaattcccagtaacttccttgtgttgtgtgtattcaactcacagagttgaacgatcctttacacagagcagacttgtaacactctttttctggaatttgcaagtggagatttcagcctctttgaagtcaaaggtagaaaaggaaatatcttcctataaaaactagacagaacgattctcagaaactcctttgtgatgtgtgcgttcaactcacagagtttaacctttcttttcatagagcagttaggaaacactctgtttgtaaagtctgcaagtggatattcagacctccctgaggccttcgttggaaacgggatttcttcatattctgctacacagaagaattctcagtaacttcgttgtgttgtgtgtattcaactcacagagttgaacgatcctttacacagagcagacttgaaacactctttttgtggaatttgcaagtggagatttcagccgctttgaggtcaaaggtagaaaaggaaatatcttcgtataaagactagacagaatgattctcagaaactcctttgtgatgtgtgcgttcaactcacagagtttaacctttcttttcatagagcagttaggaaacactctgattgtaaagtctgcaagtggatattcagacctccttgaggccttcgttggaaacgggatttcttcatattctgctagacagaagaattctcagtaacttccttgtgttgtgtgtattcaactcacagagttgaacgatcctttacacagagcagacttgaaacactctttttgtggaatttgcaagtggagatttcagccgctctgaggtcaatggtagaataggaaatatcttcctatagaaaatagacagaatcattctcagaaactgctctgtgatgtgtgcgttcaactctcagagtttaacttttcttttcattcagcagtgtggaaaaactctgtttgtaaagtctgcacgtggatattctgaccacttagaggccttcgttggaaacgggtttttttcctgtaaggctagacagaagaattcccagtaacttccctgtgttgtgtacattcaactcacagagttgaacgttcccttagacagagcagatttgaaacacactttttgtgcaattggcaaatggagatttcaagcgctttaagttcaatggcagaaaaggaaatatcttcgtttcaaaactagacagaatcattcccacaaactgcgttgtgatgtgttcgttcaactcacagagtttaacatttctgttcatagagcagttaggaaacactctgtttgtaaagtctgcaagtggatattcagacctccttgaggccttcgttggaaacgggatttcttcttattctgctagacagaagaattcccagtaacttccttgtgttgtgtgtattcaactcacagagttgaatgatcctttacacagagaggacttgaaacactctttttgtggaatttgcaagtggagatttcagccgctttgaagtcaaaggtagaaaaggaaatatcttcgtataaaaactagacagaatgattctcagaaactcctttgtgatgtgtgcgttcaactcacagagtttaacctttcttttcttagagcagttaggaaacactctgtttgtaatgtctgcaagtggatattcatacctcctttaggccttcgttggaaacgggtttttttcatataaggctagacagaagaattctcagtaacttaccttgtgttgtgtgtattcaactgacagagttgaactttcatttagagagagcagatttgaaacactgtttttgtggaatttgcaagtggagatttcaagcgctttgcggccaaaggcagaaaaggaaatatcttcgtataaaaactagacagaatcattctcagaaactactgcgtgatgtgtgcgttcaactctcagagtttaacttttcttttcattcagcggtttggaaacactttgtttgtaaagtctgcacgtggatattttgaccacctagaggccttcgttggaaacgggtttttttcatgtaaggctagacagaagaattcccagtaacttccttgtgttgtgtacattcaactcacagagttgaacgatcccttagacagagcagatttgaaacactctttttgtggaatttgcaaatggagatttcaagcgctttgaggccaaaggcagaaaaggaaatatcttcgtataaaaactagacagaatcattcccacaaactgcgttgtgatgtgttcgttcaactcacagagtttaacctttctgttcatagagcagttaggaaacactctgtttgtaaagtctgcaagtggatattcagacctccttgaggccttcgttggaaacggtatttcttaatattctgctagacagaagaattctcagtaacttccttgtgttgtgtgtattcaactcacagagttgaacgatcctttacacagagcagacttgaaacactctttttgtggaattcgcaagtggatatttcagccgctttgaggtcaatggtagaataggaaatatcttcctatagaaactagacagaatgattctcagaaactcctttgtgatgtgtgcgttcaactcacagagttcaacttttcttttcatagagcagttaggaaacactctgtttgtaaagtctgcaagtggatattcagacctctttgaggccttcgttggaagcgggatttcttcatattatgctagacagaagaattctcagtaacttccttgtgttgtgtgtattcaactaacagagttgaactttcatttagagagagcagatttgaaacactgtttttgtggaatttgcaagtggagatttcaagcgctttggggccaaaggcagaaaaggaaatatcttcgtataaaaactagacagaatcattctcacaaactgctctgcgatgtgtgcgttcaactctcagagtttaacttttcttttcattcagcagtttggaaacactctgtttgtaaagtctgcacgtggatattttgaccacttagaggccttcgttggaaacgggtttttttcctgtaaggctagacagaagaattcccagtaacttcccttgtgttgtgtacattgaactcacagagttgaacgttcccttagacagagcagatttgaaacactctttttgtgcaattggcaagtggagatttcaagcgctttaaggtcaatggcagaaaaggaaatatcttcgtttcaaaactagacagaatcattcccacaaactgtattgtgatgtgttcgttcaactcacagagtttaacctttcttttcatagagcagttaggaaacagtctgtttgtaaattctgtaagtggatattctgacatcttgtggccttcgttggaaacgggatttcttcatattctgctagtcagaagaattctcagtaacttccttgtgttgtgtgttttcaactcacagagttgaacgatcctttacacagagcagacttgaaacactctttttttggaatttgaaagtggagatttcagccgctttgaggtcaatggtagaaaaggaaactatcttcgtataaagactagacagaatgattctcagaaactcctttgtgatgtgtgcgttcaactcacagagtttaacctttcttttcatagagcagttaggaaacactctgtttgtaaagtctgcaagtggatattcagacctctttgaggccatcgttggaaacgggatttgttcatattctgctagagagaagaatccccagtaacttccttgtgttgtgtgtgttcaactcacagagttgaactttcatttacacagagcagatttgaaacactctttttgtggaatttgcaagtggagatttcaagcgctttgaggccaaaggcagaaaaggaaatatcttcgtttcaaaactagacagaatcattctcagaaactgctgcgtgatgtgtgcgttcaactctcagagtttaacttttccttttcattcagcggtttggaaacactctgtttgtaaagtctgcacgtggatattttgaccacttagaggccttcgttggaaacgggtttttttcatgtaaggctagacagaagaattctcagtaacttccttgtgttgtgtgtattcaactcacagagttgaacgatcctttacacagagcagaacgatcctttacacagagcagacttgaaacattctttttgtggaatttgcaagtggagatttcaaccgctttgaggtcaatggtagaataggaaatatcttcctatagaaactagacagaacgattctcagaaactcctttctgatgtgtgcgttcaactcacagagtttaacctttcttttcatatagcagttaggaaacactctgtttgtaaagtctgcaagtggatattcagacctctttgaggccttcgttggaaacgggatttcttcatattctgctagacagaataattctcaataacttccttgtgttgcgtgtattcaactcttagagttgaacgatcctttacagagagcagacttgaaacactctttttgtggaatttgcaagtggagatttcagccgctttgaggtcaatggtagaataggaaatatcttcctatagaaactagacagaatgattctcataaactcctttgtgatgtgtgcgttcaactcacaaagtttaacttttcttttcatagagcagttaggaaacactctgtttgtaaagtctgcaagtggatattcagacctctttgaggccttcgttggaaacgggatttcttcatattatgctagacagaagaattctcagtaacttccttgtgttgtgtgtattcaactcacagagttgaacgatcctttacacagagcagacttgaaacattctttttgtggaatttgcaactggagatttcagccgcttagaggtcaatggtagtataggaaatatcttcctatagaaactagacacaatcattctcagaaagtgctctgcgatgtgtgcgttcaactctcagagtttaactttgcttttcattcagcagtttggaaacactctgtttgtaaagtctgcacgtggataatttgaccacttagaggccttcgttggaaacgggtttttttcatgtaaggctagacagaataattcccagtaacttccttgtgttgtgtacattcaactcacagagatgaacgttcccttagacagagcagatttgaaacactctttttgtgcaattgacaagtggagatttcaagcgctttaaggtcactggcagaaaaggaaatatcttcgtttcaaatgtagacagaatgattcccacaaactgcgttgtgatgtgttcgttcaactcacagagtttaacctttcttttcatagagcagttaggaaacactctgtttgtaaattctgcaagtggatattcagacctctttgaggccttcgttgcaaacgggatttcttcatattatgcctgacagaagaattctcagtaacttccttgtgttgtgtgtattcaactcacagagttgaacgatcctttacacagagcagacttgaaactctctttttgtggaatttgcaagtggagatttcagccgctttgagttcaatggtagaataggaaatatcttcctatagaaactagacagaatgattctcagaaactcctttgtgatgtgtgcgttcaactcacagtagtttaacgtttcttttcatagagcagttaggaaacactctgtttctaaagtatgcaagtggatattcagacctctttgaggccttcgttggaaacgggtttttttcatataaggctagagagaagaattctcagtaacttccttgtgttgtgtgtattcaactgacagagttgaactttcatttagagagagctgatttgaaacactgtttttgtggaatttgcaagtggagatttcaagcgctttggggccaaaggcagaaaaggaaatatcttcgtataaaaactagacagaatcattctcagaaactgctgcatgatgtgtgcgttcaactctcagagtttaacttttcttttcattcagcggtttggaaacactctgtttgtaaagtctgcacgtggatattttgaccacttagaggccttcgttggaaacgggttttttttcatgtaaggctagacagaagaattcccagtaacttccttgtgttgtgtacattcaactcacagagttgaacgttcccttagacagagcagatttgaaacactctttttgtgcaattggcaagtggagatttcaagcgctttgaggtcaatggcagaaaaggaaatatcttcgtttcaaaactagacagaatgattctcagaaactcctttgtgatgtgtgcgttcatctcacagagtttaacttttcttttcatagagcagttaggaaacactctgtttgtaaagtctgcaagtggatattcagacctctttgaggccttcgttggaaacgggattcttcatattatgctagacagaataattctcagtaacttccttgtgttgtgtgtattcaactcacagagatgaacgatcctttacagagagcagacttgaaacactctttttgtggaatttgcaagtggagatttcagccgctttgaggtcaatggtagaaaaggaaatatcttcgtataaagactagacagaatgattctcagaaactcctttctgatgtgtgtgttcaactcacagagtttaacctttcttttcatagagcagttagtaaacagtctgtttataaagtctgcaagtggatattcagacccctttgaggccttcgttggaaacgggatttcttcatattatgctagacagaagaattcccagtaacttccttgtgttgtctgtgttcaactcacggagttgagctttcatttacacagagcagatttgaaacactctttttgtggaatttgcaagtggagatttcaagcgctttgaggccaaaggcagaaaaggaaatatcttcgtataaaatctagacagaatcattctcagaaactgctctgtgatgtgtgcgttcaactctcagagtttaacttttcttttcattcagcagtttggaaacactctgtttgtaaagtctgcacgtggatattttgaccacttagaggccttcgttggaaacgggttttcttcatgtaaggctagacagaagaattcccagtaacttccttgtgttgtgtgcattcaactcacagagttgaacgttcccttagacagagcagatttgaaacagcctatttgtgcaatttgcaagtgtagatttcaagcgctttaaggtcaacggcagaaaaggaaatatcttcctttcaaaactagacagaatcattcccacaaactgcgttgtgatgtgttcgttcaactcacagggtttaacctttctgttcatagagcagttaggaaacactctgtttgtaaagtctgcaagtggatattcagacctccttgaggccttcgttggaaacgggatttcttcatattctgctagacagaagaattctcagtaacttccttgtgttgtgtgtattcaactcacagagttgaacgatcctttacacagagcagacttgaaacactctttttgtggaatttgcaagtggagatttcagccgctttgagttcaatggtagaataggaaatatcatcctatagaaactagacagaatgattctcagaaactcctttgtgatgtgtgcgttcaactcacagagtttaacctttcttttcatagagcagttaggaaacactctgtttgtaaagtctgcaagtggatattcagacctctttgaggtcttcgttggaaacgggtttttttcatataaggctagacagaagaattcccagtaacttcccttgtgttgtgtgtgttcaactctgtgagttgaactttcatttacacagagcagattggaaacactctttttgtggaatttgcaagtggagatttcaagcgctttgaggccaaaggcagaaaaggaaatatcttcgtataaaaactagacagaatcattctcagaaactgctctgcgatgtgtgcgttcaactctcagagtttaacttttgttttcattcagcagtttggaaacactctgtttgtaaagtctgcacgtggatattttgagcacttagaggccttcgttggaaacgggtttttatcctgtaaggctagacagaagaattcccagtaacttccttgtgttgtgtacattcaactcacagagttgaacgttcccttagacagagcagatttgaaacactctttttgtgcaattggcaagtggagatttcaagcgctttaaggtcaatggcagaaaaggaaatatcttcgtttcaaaactagacagaatgattctcagaaactcctttgtgatgtgtgcgttcaactcacagagtttaacttttcttttcatagagcagttaggaaacactctgtttgtaaagtctgcaagtggatattcagacctctttgaggctttcgttggaaacgggatttcttcatattctgctagacagaagaattctcagaatcttccttgtgttgtgtgtattcaactcacagagttgaacgatcctttacacagagcagacttgtaacactctttttgtggaatttgcaagtggagatttcagccgctttgaggtccatggtagaaaaggaaatatcttcgtataaaaactagacagaatgattctcagaaactcctttgtgatgtgtgcgttcaactcacagagtttaacctttcttttcatagagcagttaggaaacactctgtttgtaaagtctgcaagtggatattcagacctccttgaggccttcgttggaaacgggttttgttcatattatgctagacagaagagttctcagtaacttccttgtgttgtgtgtattcaactcacacagttgaactttcatttacacagagcagatttgaaacactctttttgtggaatttgcaggtggagatttcaagcgctttgaggccaaaggcagaaaaggaaatatcttcgtataaaaactagacagaatgattctcagaaacttctttgtgatgagtgcgttcaactcacagagtttaacctttcttttcatcgagtagttaggaaacactctgtttgtaaagtctgcaagtggatattttgacctctttgaggctttcgttggaaacgggtttttttcctgtaaggctagacagaagaattcccagtaacttccttgtgttgtgtacattcaactcacagagttgaacgttcccttagacagagcagatttgaaacactctttttgtgcaattggcaagtggagatttcaagcgctttaaggtcaatggcagaaaaggaaatatcttcgtttcaaaactagacagaatgattctcagaaactcctttgtgatgtgtgcgttgaactcacagagtttaacctttctgttcatagagcagttaggaaacactctgtttgtaaagtctgtaagtggatattctgacatcttgtggccttcgttggaaacgggatttcttcatattctgctagacagaagaattctcagtaacttccttgtgttgtgtgtattcaactcacagagttgaacaatcctttacacagagcagacttgaaacactctttttgtggaatttgcaagtggagatttcagccgctttgaggtcaatggtagaaaaggaaactatcttcatataaagacttgacagaatgattctcagaaactcctttgtgatatgtgcgttcaactcacagagtttaacctttcttttcatagagcagttaggaaacactctgtttgtaaaatctgcatgtggatatttggacttctttgaggccttcgttggaaacgggtttttttcatgtaaggctagacagaagaattcccagtaacttccttgtgttgtgtgtgttcaactcacagagttgaactttgatttacacagagcagatttgaaacactctttttgtggaatttgcaaatggagatttcaagcgctttgaggccaaaggcagaaaaggaaatatctttgtataaaaactagacagaatgattctcagaaactcctttgtgatgtgtgcgttcaactcacagagttcaacctttcttttcatagagcagttgggaaacactctgttagtaaagtctgctagtggatattcagacctctttgaggccttcgttggaagcgggatttcttcatattctgctagacaaaagaattctcagtaacttccttgtgttgtgtgtattcaactcacagaattgaacgatcctttacacagagcagacttcaaacactctttttgtggaatttgcaagtggagatttcagccgctttgaggtcaatggtagaaaaggaaatatcttcgtataaaaactagacagaatgattctcagaaactcctttgtgatgtgtgcgttcaactcacagagtttaacctttcttttcatagagcagttaggaaacactctgtttgtaaagtctgcaagttgatattcagacctccttgaggccttcgttggaaacgggatttcttcatattatgctagacagaagaattctcagtaacttccttgtgttgtgtgtattcaactcacagagttgaacgatcctttacacagagcagacttgaaacactctttttgtggaatttgcaagtggagatttcagccgctttgaggtcaatggtagaaaaggaaatatcttcgtataaaaacgagacagaatgattctcagaaacttctttgtgatgtgtgcgttcaactcacagagtttaacctttctgttcatagtgcagttaggaaacactctgtttgtaaactctgcaagtggatattcagacctctttgaggccttcgatggaaacgggatttctccatactgtgctagacagaagaattcccagtaacttccttgtgttgtgtgtgttcaactcacagagttgaactttcatttacacagagcagatttgaaacactctttttgtggaatttgcaagtggagatttcaagcggtttgaggccaaaggtagaaaaggaaatatcttcgtttcaaaactagacagaatcattctcagaaactgctctgcgatgtgtgcgttcaactctcagagtttaacttttcttttcattcagcagtttggaaacactctgtttgtaaattctgcacgtggatattttgaccacttagaggccttcgttggaaacgggtttttttcctgtaaggctagacagaagaaatcccagtaacttccttgtgttgtgtgcattcaactcacagagttgaacgttcccttagacagagcagatttgaaacactctatttgtgcaatttccaagtgtagatttgaagcgctttaaggtcaacggcagaaaaggaaatatcttcgtttcaaaactagacagaaatcattctcataaactgctctgcgatgtgtgcgttcaactctcagagtttaacttttcttctcattcagcagtttggaaacactctgtttgtaaagtctgcacgtggataatttgaccacttagaggccttcgttggaaacgggtttttttcatgtaaggctagacagaagaattctcagtaacttccttgtgttgtgtgtattcaactcacagagttgaacgatcctttacacagagcagacttgtaacactctttttgtggaatttgcaagtggagatttcagccgctttgaagtctaaggtagaaaaggaaatatcttcctataaaaactagacagaatgattctcagaaactcctttgtgatgtgtgcgttcaactcacagagtttaacctttcttttcatagagcagttaggaaacactctgtttgtaaagtctccaagtggatattcagacctctttgaggccttcgttggaaacgggtttttttcatataaggctagacagaagaattcccagtaacttccttgtgttgtgtgtgttcaactcacagagttgaactttcgtttacacagagcagatttgaaacactctttttgtggaatttgcaaatggagatttcaagcgctttgaggccaaaggcagaaaaggaaatatcttcgtataaaaactagacagaatcattctcagaaactgctgcgtgatgtgtgcgttcaactctcagaatttaacttttcttttcattcagcggtttggaaacactctgtttgtaaagtctgcacgtggaaattttgaccacttagaggccttcgttggaaacgggtttttttcatgtaaggctagacagaagaattcccagtaacttccttgtgttgtgtgcattcaactcacagagttgaacgttcccttagacagagcagatttgaaacactctatttgtgcaatttgcaagtgtagatttcaagcgctttaaggtcaatggcagaaaaggaaatatcttcgtttcaaaactagagagaatgattctcagaaactcctttgtgatgtgtgcgttcaactcacagagtttaacctttcttttcatagagcagttaggaaacactctgttggtaaagtctgcaagtggatattcagacctctttgaggccttcgttggaagcgggatttcttcatgttctgctagacagaagaattctcagaaacttccttgtgttgtgtgttttcaactcacagagttgaacgatgctttacacagagtagacttgaaacactctttttgtgtaatttgcaagtggagatttcatccgctttgaggtcaatggtagaaaaggaaatatcttcgtataaaaactagacagaatgattctcagaaactcctttgtgatgtgtgtgttcaactcacagagtttaacgtttcttttcatagagcagttagtaaacactctgtttataaagtctgcaagtggatattcagacccctttgaggccttcgttggaaacgggatttcatcatattatgctagacagaagaattctcagtaacttccttgtgttgtgtgtattcaactgacagagttgaactttcatttagagagagcagatttgaaacactgtttttgtggaatttgcaagtggagatttcaagcgctttggggccaaaggcagaaaaggagatatcttcgtataaaaactagacagaatgattctcagaaactcctttgtgatgtgtgcgttcaactctcagagtttaacttttcttttcattcagcagtttggaaacactctgtttgtaaagtctgcacgtggatattttgaccacttagaggccttcgttggaaacgggtttttttacctgtaaggctagacagaagaattcccagtaacttccttgtgttgtgtgcattcaactcacagagatgaacgttcccttagacagagcagatttgaaacactctatttgtgtaatttgcaagtgtagatttcaagcgctttaaggtcaatggcagaaaaggaaatatctccgtttcaaaactagacagaatcattcccacaaactgcgttgtgatgtgttcgttcaactcacagagtttaacctttccgttcatagagcagttaggaaacacactgtttgtaaagtctgtaagtggatattctgacatcttgtggccttcgttggaaacgggatttcttcatattctgctagacagaagaattctcagtaacttccttgtgttgtgtgtattcaactcacagagttgaacgatcctttacacagagcagacttgtaacactctttttgtggaatttgcaattggagatttcagccgctttgaagtcaaaggtagaaaaggaaatatcttcctataaaaactagacagaatgattctcagaaactcctttgtgatgtgtgcgttcaactcacagagtttaacctttcttttcatagagcagttaggaaacactctgtttgtaaagtctgcaagtggatattcagacctctttgaggccttcgttggaaatgggtttttttcatataaggctagagagaagaattctcagtaacttccttgtgttgtgtgtattcaactgacagagttgaactttcatttagagagagcagatttgaaacactgtttttgtggaatttgcaagtggagatttcaagcgctttggggccaaaggcagaaaacgaaatatcttcgtataaaaactagacagaatcattctcagaaactgctctgcgatgtgtgcgttcaactctcagagtttaactttgcttttcattcagcagtttggaaacactctgtttgtaaagtctgcacgtggatattttgaccacttagaggccttcgttggaaacgtgtttttttcctgtaaggctagacagaagaattcccagtaacttccttgtgttgtgtacattcaactcacagagttgaacgttcccttagacagagcagatttgaaacactctttttgtgcaattggcaagtggagatttcaagcgctttaaggtcaatggcagaaaaggaaatatcttcgtttcaaactagacagaatcattctcagaaactgctctgtgatgtgtgcgttcaactctcagagtttaaattttcttctcattcagcagtttggaaacactctgtttgtaaagtctgcacgtggataatttgaccacttagaggccttcgttggaaacgggtttttttcatgtaaggctagacagaagaattctcagtaacttccttgtgttgtgtgtattcaactcacagagttgaaagaccctttacacagagcagacttgaaacactctttttgtggaatttgcaagtggagatttcagccgctttgaagtcaaaggtagaaaaggaaatatcttcgtataaaaactagatagaatgattctcataaactcctttgtgatgtgtgcgttcaactcacagagtttaacctttcttttcatagagcagttaggaaacactctgtttgtaaagtctgcaagtggatattcagacctctttgaggccttcgttggaaactggatttcttcatattctgctagacagaagaattcccagtaacttccttgtgttgtgtgtgttcaactcacagagttgaactttcatttacacagagcagatttgaaacactctttttgtggaatttgcaaatggagatttcaagcgctttgaggccaaaggcagaaaaggaaatatcttagtataaaaactagacagaatgattctcagaaactgctctgtgatgtgtgcgttcaactctcagagtttaacttttcttttcattcagcagtttggaaacactctgtttgtaaagtctgcacgtggataatttgaccacttagaggccttcgttggaaacgggtttttttcaagtaaggctagacagaagaattcccagtaacttccttgtgttgtgtgcattcaactcacagagttgaacgttcccttagacagagcagatttgaaacactctatttgtgcaatttgcaagtgtagatttcaagcgctttaaggtcaacggcagaaaaggaaatatcttcgtttcaaaactagacagaatcattcccacaaactgcgttgtgatgtgttcgttcaactcacagagtttaacctttcttttcatagagcagttaggaaacagtctgtttgtcaattctgtaagtggatattctgacatcttgtggcctttgttggaaacgggatttcttcatattctgctagacagaagaattctcagaatcttccttgtgttgtgtgtattcaactcacagagtttaacgatcctttacacagagcagacttgaaacactctttttgtggaatttgcaagtggagatttcagccgctttgaggtccatggtagaaaaggaaatatcttcgtataaaaactagacagaatgattctcagaaactcctttgtgatgtgtgcgttcaactcacacagtttaacctttcttttcatagagcagttgggaaacactctgtttgtaaaatctgcaagtggatattcagacctccttgcggccttcgttggaaacgggatttcttcatattatgctagacagaataattctcagtaacttccttgtgttgtgtgtattcaactcacggagttgaacgatcctttacacagagcagacttgaaacactctttttgtggaatttgcaagtggagatttcagccgctttgaagtcaatggtagaataggaaatatcttcctatagaaactaggcagaatcattctcagaaactgctgcgtgatgtgtgcgttcaactctcagagtttaacttttcttttcattcagcggtttggaaacactctgtttgtaaagtctgcacgtggatattttgaccacttagaggccttcgttggaaacgggtttttttcatgtaaggctagacagaagaattcccagtaacttccttgtgttgtgtgcattcaactcacagagttgaacgttccctgagacagagcagatttgaaacactctatttgtgcaatttgcaagtgtagatttcaagcgctttaaggtcaacggcagaaaaggaaatatcttcgtttcagaactagacagaatcattcccacaaactgcgttgtgatgtgttcgttcaactcacagcagtttaacctttctgttcatagagcagttaggaaacactctgtttgtaatgtctgtaagtggatattctgacatcttgtggccttcgttggaaacgggatttcttcatattctgctagacagaagaattctcagtaacttccttgcgttgtgtttattcaactcacagagttgaatgatcctttacacagagcagacttgaaacactctttttgtggaatttgcaagtggagatttcagccgctttgaggtcaatggtagaaaagtaaatatcttcgtataaggactagacagaatgattctcagaaactcctttgtgatgtgtgcgttcaactcacagagttcaacctttcttttcatagagcagttgggaaacactctgtttgtaatgtctgcaagtggatattcagacttctttgaggccttcgttggaagcgggatttcttcatattctgctagacagaagaattcccagtaacttccttgtgttgtgtgtgttcaactcacagagttgaactttcatttacccagagcagatttgaaacactctttttgtggaatttgcaagtggagatttcaagcgctttgagcccaaaggcagaaaaggaaatatcttcgtttcaaaactagacagaatcattctcagaaactgctgcgtgatgtgtgcgttcaactctcagagtttaacttttcttttcattcagcggtttggaaacactctgtttgtaaagtctgcacgtggaaattttgaccacttagagaccttcattggaaacgggtttttttcatgtaaggctagacagaagaattcccagtaacttccttgtgttgtgtacattcaactcacagagttgaacgttcccttagacagagcagatttgaaacactctttttgtgcaattggcaagtggagatttcaagcgctttaaggtcaatggcagaaaaggaaatatcttcgtttcaaaactagacagaatgattctcagaaactcctttgtgatgtgtgcgttcaactcacagagtttaacctttcttttcatagagcagttaggaaacactctgtttgtaaagtctgcaagtggatattcagacctccttgagtccttcgttggaaacgggatttcttcatattatgctagacagaagaattctcagtaacttccttgtgttgtgtgtattcaactcacagagttgaacgatcctttacacagagcagacttgaaacactctttttgtggaatttgcaagtggagatttcagccgctttgaggtcaattgtagaataggaaatatcttcctatagaaactagacagaatgattctcagaaactcctttgtgatgtgtgcgttcaactcacagagttcaacctttcttttcatagagcagttgggaaacactctgtttgtaaagtctgcaagtggatattcagacttcttagaggccttcgttggaagcgggatttcttcatattctgctagacagaagaattcccagtaacttccttgtgttgtgtgtgttcaactcacagagttgaactttcatttacacagagcagatttgaaacactctttttgtggaatttgcaagtggagatttcaagcgctttgaggccaaaggcaggaaaggaaatatcttcgtataaaaactagacagaatcattctcagaaactgctctgcgatgtgtgcgttgaactctcagagtttaacttttcttttcattcagcaatttggaaacactctgtttgtaaagtctgcacgtggatattttgaccacttagaggccttcgttggaaacgggtttttttcctgtaaggctagacagaagaattctcagtaacttccttgtgttgtgtgtattcaactcacagagttgaacgatcctttacacagagcagacttgtaacactctttttctggaatttgcaagtggagatttcagccgctttgaagtcaaaggtagaaaaggaaataacttcctataaaaactagacagaatgattctcagaaacttctttgtgatgtgtgcgttcaactcacagagtttaacctttcttttcatagagcagttaggaaacactctgtttgtaaactctgcaagtggatattcagacctctttgaggccttcgttgcaaacgggatttcttcatgctatgctagacagaagaattctcactaacttccttgtgttttgtgtattcaactcacagagttgaacgatcctttacacagagcagacttgaaacactctttttgtggaatttgcaagtggagatttcagccgctttgaggtcaatggtagaaaaggaaatatcttcgtataaagactagacagatagattctcagaaactcctttgtgatgtgtgcgttcaactcacagagtttaacctttcttttcatagagcagttaggaaacactctgtttgtaaagtctgcaagtggatattcagacctctttgaggccatcgttggaaacgggtttttttcatataaggctagacagaagaattcccagtaacttccttgtgttgtgtgtgttcaactcacagagttgaactttcatttacacagagcagattggaaacactctttttgtggaatttgcaaatggagatttcaagcgctttgaggccaaaggcagaaaaggaaatatcttcgtataaaaactagacagaatcattctcagaaactgctctgcgatgtgtgcgttcaactctcagagtttaacttttcttttcattcagcagtttggaaacactctgtttgtaaagtctgcacgtggatattttgaccacttagaggccttcgttggaaacgggtttttttcctgtaaagctagacagaagaattcccagtaacttccttgtgttgtctacattcaactcacagagttgaacgttcccttagacagagcagatttgaaacactctttttgtgcaattggcaagtggtgatttcagccgctttggggtcaatggtagaaaaggaaatatcttcgtataaaaactagacagaatgattctcagaaacttcattgtgaagtgtgcgttcaactcacagagtttaacctttcttttcatagagcagttaggaaacactctgtttgtaaagtctgcaagtggatattcagacctctttgaggccttcgttggaaacgggatttcttcatactgtgctatacagaagaattctcagtaacttcattgtgttgtgtgtattcaactcacagagttgaacgatcctttacacagagcatacttgaaacactcttgttgtggaatttgcaagtggagatttcagccgctttgaggtcaatggtagaataggaaacatcttcctatagaaactagacagaatgattctcagaaactccttagtgatgtgtgtgtccaactcacagggtttaacctttcttttcatagagcagttagcaaacactctgtttgtaaagtctgcaagaggatattcagacctttttgaggccttcgttggaaacgggtttttttcatataaggctagacagaagaattcccagtaacttccttgtgatgtgtgtgttcaactcacagagttgaactttcatttacatagagcagatttgaaacactctttttgtggaatttgcaagtggagatttcaagcgctttgaggccaaaggcagaaaaggaaatatcttcgtataaaaactacacagaatcattctcagaaactgctgcgtgatgtgtgcgttcaactctcagagtttaacttttcttttcattcagcagtttggaaacactctgtttgtaaagtctgcacgtggaaattttgaccacttagaggccttcgttggaaacgggtttttttcatgtaaggctagacagaagaattcccagtaacttccttgtgttgtgtacattcaactcacagagttgaacgttcccttagacagagcagatttgaaacactctttttgtacaattggcaagtggagatttcaagcgctttaaggtcaaaggcagaaaagaaaatatcttcgtttcaaaactagacagaatcattcccacaaactgcgttgtgacgtgttcgttcaactcacagagtttaacctttctgttcatagagcagttaggaaaaactctgtttgtaaagtctgtaagtggatattctgacatcttgtggccttcgttggaaacgggatttcttcatattctgctagacagaagaattctcagtaacttccttgtgttgtgtctattcaactcacagagttgaacgatcctttacacagagcagacttgaaacactctttttgtggaatttgcaagtggagatttcagccgctttgaggtcaatggtagaaaaggaaatatcttcgtataaagactagacagaatgattctcagaaactcctttgtgatgtgtgcgttcaactcacagagtttaacgtttctgttcatagagctgttaggaaacactctgtttgtaaagtctgcaagtggatattcagacctccttgaggccttcgttggaaacgggatttcttcatattctgctagacagagtaattctcagtaacttccttgtgttgtgtgtattcaactcacagagttgaacgatcctttacacagagcagatttgtaacactctttttgtggaatttgcaagtggagatttcaagcgctttgaggccaaaggcagaaaaggaaatatcttcgtttcaaaactagacagaatcattctcagaaactgctctgcgatgggtgcgttcaactctcagagtttaacttttcttttcattcagcagtttggaaacactctgtttgtaaagtctgcacgtggataacttgaccacttagaggacttcgttggaaacgggtttttttcctgtaaggctagacagaagaattcccagtaacttccttgtgttgtgtacattcaactcacagagttgaacgttcccttagacagagcagatttgaaacactctttttgtgcaattggcaaatggagatttcaatcgctttaaggtcaatggcagaaaaggaaatatcttcgtttcaaaactagacagaatcattcccacaaactgcgttgtgatgtgttcgttcaactcacagagtttaacctttcttttcttagagcagttaggaaacagtctgtttgtcaattctgtaagtggatattctgacatcttgtggccttcgttggaaacgggatttcttcatattctgctagacagaataattctcagtaacttcccttgtgttgtgtgtattcaactcacagagttgaacgatcctttacacagagcagacttgaaacactctttttgtggaatttgtaagtggagatttcagccgctttgaggtcaatggtagaataggaaatatcttcctatagaaactagacagaatgattctcagaaactcctttgtgatgtgtgcgttcaactcacagagtttaacctttcttttcatagagcagttaggaaacactctgtttgtaaagtctgtaagtggatattcagacctccttgaggccttcgttggaaacgggatttcttcctattatgctagacagaagaattctcagtaacttccttgtgttgtgtgtattcaactcacagagttgaacgatcctttacacagagcagacttgaaacacactttttgtggaatttgcaagtggagatttcagccgctttgggttcaatggtagaataggaaatatcttcctatagaaactagacagaatcattctcagaaactgctctgcgatgtgtgcgttcaactctcagagtttaacttttcttttcattcagcagtttggaaacactctgtttgtaaagtctgcacgtggatactttgaccacttagaggccttcgttggaaacgggtttttttcctgtaaggctagacagaagaattcccagtaacttccttgtgttgtgtgcattcaactcacagagttgaacgttcccttagacagagcagatttgaaacatcctatttgtgcaatttgcaagtgtagatttcaagcgctttaaggtcaacggcagaaaaggaaatatcttcctttcaaaactagacagaatcattcccacaaactgcgttgtgatgtgttcgttcaactcacagagtttaacctttcttttcatagagcagttaggaaacagtctgtttgtaaattttgtaagtggatattctgacatcttgtggccttcgttggaaacgggatttcttcatattctgctagacagaagaattctcagtaacttccttgtgttgcgtgtattcaactcacagagttgaacgatcctttacccagagcggacttgaaacactctttttgtggaatttgcaagtggagatttcagccgctttgaggtcaatggtagaaaaggaaatatcttcttatacagactagacagaatgattctcagaaactcctttgtgatgtgtgcgttcaactcacagagttcaacctttcttttcatagagcagttgggaaacactctgtttgtaaagtctgcaagtggatattcagacctccttgaggccttcgttggaaacgggatttcttcatattctgctagacagaagaattcccagtaacttccttgtgttgtgtgtgttcaactcacagagttaaactttcatttacccagagcagatttgaaacactctttttgtggaatttgaaagtggagatttcaagcgctttgaggccaaaggcagaaaaggaaatatcttcgtttcaaaactagacagaatcattctcagaaagtgctctgcgatgtgtgcgttcaactctcagagtttaactttgcttttcattcagcagtttggaaacactctgtttgtaaagtctgcacgtggataatttgaccacttagaggccttcgttggaaacgggtttttttcatgtaaggctagacagaagagttctcagtaacttccttgtgttgtgtgtattcaactcacacagttgaacgatcctttacagagagcagacttgtaacactctttttgtggaatttgcaagtggagatttcagccgctttgaagttaaagtagaaaaggaaatatcttcctataaaaactagacagaatgattctcagaaactcctttgtgatgtgtgcgttcaactcacagagtttaacctttcttttcatggagcagttaggaaacacactgtttgtaaagtctgcaagtggatattcagacctccttgaggccttctttggaaacgggatttcttcatattctgctagacagaataattctcagtaacttccttgtgttgtgtgtattcaactcacagagttgaacgatcctttacacagagcagacttgaaacactctttttgtggaatttgcaagtggagatttcagccgctttgaggtcaatggtagaaaaggaaatatcttcgtataaagactagacagaatgattctcagaaactcctttttgatgtgtgcgttcaactcacagagtttaacctttcttttaatagagcaattaggaaacactctgtttctaaagtctgcaagtggatattcagacctcttagcggccttcgttggaaacgggatttcttcatattttgctagacagaagaattctcagtaacttccttgtgttgtgtgcattcaactcacagagttgaacgatcctttacacagagcagattggaaacactctttttgtggaactgcaagaggagatttcagccgctttgaggtcaatggtagaaaaggaaatatcttcgtataaaaactagacagaatcattctcagaaactgctctgcgatgtgtgcgttcaactctcagagtttaacttttcttttcattcagcagtttggaaacactctgtttgtaaagtctgcacgtggatattttgaccacttagaggccttcgttggaaacgggtttttttcctgtaaggctagagagaagaattcccaggaacttccttgtgttgtgtacattcaactcacagagttgaacgttcccttagacagagcagatttgaaacactctttttgtgcaattggcaagtggtgatttcagcagctttgaggtcaatggtagaaaaggaaatatcttcgtataaaaactagacagaatgattctcagaaactcctttgtgatgtgtgcgttcaactcacagagttcaacctttcctttcatagagcagttgggaaacactctgtttgtaaagtctgcaagtggatattcagactttgaggccttcgttggaagcgggatttcttcatattctgctagacagaagaattctcagtaactgccttgtgttgtgtgtattcaactcacagagttgcacgatcctttacacagagcagacttgaaacactctttttgtggaatttgcaagtggagatttcagccgctttgaggtcaatggtagaataggaaatatcttcctatagaaactagacagaatgattctcagaaacttctttgtgatgtgtgcgttcaactcacagagtttaacctttcttttcatagagcagttaggaaacactctgtttgtaaagtctgcaagtggatattcagacctccttgaggccttcgttggaagcgggatttcttcatgttctgctagacagaagaattctcagaaactttcttgtgttgtgtgttttcaactcacagagttgaacgatcctttacacagagcagacttgaaacactccttttgtggaatttgcaagtggagatttcagccgctttgaggtcaatggtagaataggaaatatcttcctatagaaagtagacagaatcattctcagaaactgctgcgtgatgtgtgcgttcaactctcagagtttaacttttcttttcattcagcggtttggaaacactctgtttgtaaagtctgcacgtggatattttgaccacttagacgccttcgttggaaacgggtttttttcatgtaaggctagacagaagaattcccagtaactttccttgtgttgtgtgcattcaactcacagagttgaacgttcccttagacagagcagatttgaaacactctatttgtgcaatttgcaattgtagatttcaagcgttttaaggtcaatggcagaaaaggaaatatcttcgtttcaaaactagacagaatcattctcagaaactgctctgcgatgtgtgcgttcaactctcagagtttaacttttcttttcattcagcagtttggaaacactctgtttgtaaagtctgcacgtggataatttgaccacttagaggtcttcgttggaaacgggtttttttcatgtaaggatagacagaagaattctcagtaacttccttgtgttgtgtgtattcaactcacagagttgaacgatcctttacacagagcagacttgtaacactctttttgtggaatttgcaagtggagatttcagccgctttgaagtcaaaggtagaaaaggaaatatcttcctataaacactagacagaatgattctcagaaactcctttgtgctgtgtgcgttcaactcacagagtttaacctttcttttcatagaacagttagtaaacactctgtttgtaaagtctgcaagtggatattcagacacctttgaggctttcgttggaaacgggatttcttcatattctgctagacagaagaattctcagtaacttccttgtgttgtgtgtattcaactgacagagttgaactttcatttagagagagcagatttgaaacactgtttttgtggaatttgccagtggagatttcaagcgcattggggccaaaggcagaaaaggaaatatcttcgtataaaaactagacagaatcattctcagaaactgctgcgtgatgtgtgcgttcaactctcagagtttaacttttcttttcattcagcggtttggaaacactctgtttgtaaagtctgcacgtggatattttgaccacttagaggccttcgttggaaacgggttttttttcatgtaaggctagacagaagaattcccagtaacttccttgtgttgtgtgcattcaactcacagagttgaacgttcccttagacagagcagatttgaaacactctatttgtgcaatttgcaagtgtagatttcaagtgctttaaggtcaacggcagaaaaggaaatatcttcgtttcaaaactagacagaatcattcccacaaactgcgttgtgatgtgttcgttcaactcacagagtttaacctttcttttcatagagcagttaggaaacagtctgtttgtaaattctgtaagtggatattctgacatcctgtggccttcgttggaaacgggatttcttcatattctgctagacagaagaattctcagtaacttccttgtgttgtgtttattcaactcacagagttgaatggtcctttacacagagcagacttgaaacactctttttgtggaatttgcaagtggagatttcagccgctttgaggtcaatggtagaaaagtaaatatcttcctataaagactagacagaatgattctcagaaactcctttatgatgtgtgcattcaactcacagagtttaacctttcttttcatagagcagttaggaaacactctgcttgtaaagtctgcaagtggatattcagccctctttgaggccttcgttggaaacgggtttttttcatataaggctagacagaagaattcccagtaacttccttgtgttgtgtgtgttcaactcacagagttgaactttcatttacacagagcagatttgaaacactctttttgtggaatttgcaagtggagatttcaagcgctttgaggccaaaggcagaaaaggaaatatcttcgcataaaaactagacagaatcattctcagaaactgctctgcgatgtgtgcgttaaactctcagagtttaacttttctttcattcagcagtttggaaacactctgtttgtaaagtctgcacgtggatattttgaccacttagaggccttcgttggaaacggttttttttcctgtaaggctagacagaagaattcccagtaacttccttgtattgtgtacattcaactcacagagttgaacgttcccttagacagagcagatttgaaacactctttttgtgcaattggcaaatggagatttcaagcgctttaaggtcaatggcagaaaaggaaatatcttcgtttcaaaactagacagaatcattcccacaaactgcgttgtgatgtgttcgttcaactcacagagtttaacctttctgttcatagagcagttaggaaacactctgtttgtaaagtctgcaagtggatattcagacctcctagaggccttcgttggaaacgggatttctccatattctgctagacagaagaattctcagtaacttccttgtgttgtgtgtattcaactcacagagttgaacgatccctttacacagagcagacttgtaacactctttttgtggaatttgcaagtggagatttcagccgctttgaagtcaaaggtagaaaaggaaatatcttcctataaaaactagacagaatgattctcagaaaatcctttgtgatgtgtgcgttcaactcacagagtttaacttttcttttcatagagcagttaggaaacactctgtttgtaaagtctgcaagtggatattcagacctctttgaggccttcgttggaaacgggatttcttcatattctgctagacagaagaattctcagtaacttccttgtgttgtgtgtattcaactgacagagttgaactttcatttagagagagcagattgaaacactgtttttgtggaatttgcaagtggagatttcaagcgctttgtggccaaaggcagaaaacgaaatatcttcgtataaaaactagacagaatcattctcagaaactgctgcgtgatgtgtgcgttcaactctcagagtttaacttttcttttcattcagcggtttggaaacactctgtttgtaaagtctgcacgtggatattttgaccacttagaggccttcgttggaaacgggtttttttcatgtaaggttagacagaagaattctcagtaacttccttgtgtggtgtgtattcaactcacagaggtgtacgatcctttacacaaagcagacttgaaacactctttttgtggaatttgcaagtggagatttcagccgctttgaggtcaatggtagaaaaggaaatatcttcgcataaagaatagacagaatgattctcagaaactcctttgtgatgtgtgcgttcaactcacagagtttaacctttctgttcatagagcagttaggaaacactctgtttgtaaagtctgcaagtggatattcagacctccttgaggccttcggtggaaacgggatttcttcatattatgctagacaaaagaattctcagtaacttccttgtgttgtgtgtattcaactcacagagttgaacgatcctttacacagagcagacttgaaacactgtttttgtggaatttgcaagtggagatttcagccgctttgaggtcaatggtagaataggaaatatcttcctatagaaactagacagaatgattctcagaaactcctttgtgatgtgtgcgttcaactcacagagtttaacctttcttttcatagagcagttaggaaacactctgtttgtacagtctgcaagtggatattcagacatccttgaggcttttgttggaaacgggatttcttcatattctgctagaaagaagaattctcagtaacttccttgtgttgtgtgtattcaactgacagaattgaactttcatttagagagagcagatttgaaacactgtttttgtggaaattgcaagtggagatttcaagcgctttggggccaaaggcagaaaaggaaatatcttcgtataaaaagtagacagaatcattctcagaaactgctgcgtgatgtgtgcgttcaactctcagagtttaacttttcttttcattcagcggtttggaaacactctgtttgtaaagtctgcacgtggatattttgaccacttagaggccttcgttggaaacgggtttttttcatgtaaggctagacagaagaattcccagtaacttccttgtgttgtgtgcattcaactcacagagttgaacgttaccttagacagagcagatttgaaacactctatttgtgcaatttgcaagtgtagatttcaagcgctttaaggtcaatggcagaaaaggaaatatcttcgtttcaaaactagacagaatcattcccacaaactgcgttgtgatgtgttcgttcaactcacagagtttaacctttcttttcatagagcagttaggaaacagtctgtttgtcaattctgtaagtggatattctgacatcttgtggccttcgttggaaacgggatttcttcatattctgctagaaagaagaattctcagtaacttccttgtgttgtgtgtattcaactcacagagttgaacgatcttttacacagagcagacttgaaacactctttttgtggaatttgcaagtggagatttcagcccttttgaggtcaatggtagaaaaggaaatatcttcgtataaagactagacagaatgattctcagaaactcctttgtgatgtgtgcgttcaactcacagagtttaacctttcttttcatagagcagttgggaaacactctgtttgtaaagtctgcaagtggatattcagacatccttgaggctttcgttggaaacaggatttcttcatattctgctagaaagaagaattcccagtaccttccttgtgttgtgtgtgttcaactcacagagttgaactttcatttacacagagcagatttgaaacactctttttgtggaatttgcaagtggagatttcaagcgctttgaggccaaaggcagaaaaggaaatatcttcgtttcaaaactagacagaatcattctcagaaactgcagcgtgatgtgtgtgttcaactctcagagtttaacttttcttttcattcagcggtttggaaacactctgtttgtaaagtctgcacgtggaaattttgaccacttagaggccttcgttggaaacgggtttttttcatgtaaggctagacagaagaattcccagtaacttccttgtgttgtgtgcattcaactcacagagttgaacgttcccttagacagagcagatttgaaacactctatttgtgcaatttgcaagtgtagatttcaagcgctttaaggtcaatggcagaaaaggaaataccttcgtttcaaaactagacagaatcattcccacaaactgcgttgtgatgtgttcgttcatctcacagagtttaacctttcttttcatagagcagttaggaaacattctgtttgtaaattctgtaagtggatattctgacatcttgtggccttcgttggaaacgggatttcttcatattctgctagacagaagaattctcagaatcttccttgtgttgtgtgtattcaactcacacagttgaacgatggtttacacagagcagatttgaaacactctttttgtggaatttgcaagtggagatttcagccgctttgaggtcaatggtagaaaaggaaatatcttcgtataaaaactagagagaatgattctgagaaactcctttgtgatgtgtgcgttcaactcacacactttaacctttcttttcatagagcaattaggaaacactctgtttgtaaagtctgcaagtggatattcagacctccttgaggccttctttggaaacgggatttcttcatattctgctagacagaaaaattctcagaatcttccttgtgttgtgtgtattcaactcacagagttgaacgatcctttacacagagcagatttgaaacactctttttgtggaatttgcaagtggagatttcaagcgctttgaggctaaaggcagaaaaggaaaatatcttcgtataacaactagacagaatcattctcagaaactgctgcgtgatgtgtgcgttcaactctcagagtttaacttttcttttcattcagcggtttggaaacactctgtttgtaaagtctgcacatggatattttgcccacttagaggccttcgttggaaacgggtttttttcatgtaaggctagacagaagaattcccagtaacttccttgtgttgtgtgcattcaactcacagagttgaacgttcccttagacagagcagatttgaaacactctatttgtgcaatttgcaagtgtagttttcaagctctttaaggtcaacggcagaaaaggaaatatcttggtttcaaaactagacagaatcattcccacaaactgcgttgtgatgtattcgttcaactcacagagtttaacctttctgttcatagagcagttaggaaacactctgtttgtaaagtctgtaagtggatattctgacatcttgtggcccttcgttggaaacgggatttcttcatattctgctagacagaagaattctcagtaacttccttgtgttgtgtgtattcaactcacagagttgaacgatcctttacacagagcagacttgaaacactctttttgtggaatttgcaagtggagatttcagccgctttgaggtcaatggtagaataggaaatatcttcctatagaaactagacaaacgattctcagaaactcctttgtgatgtgtgcgttcaactcacagagtttaacctttctgttcatagagcagttaggaaacactctatttgtaaagtctgcaagtggatattcagacctctttgaggccttcgttggaaacgggatttcttcatattctgctagacagaagaattcccagtaacttccttgtgttgtgtgtgttcaactcacagagttgaactttcatttacaaagagcatatttgaaacactctttttgtggaatttgcaagtggagatttcaagcgctttgaggccaaaggcagaaaaggaaatatcttcgtataaaaactagacagaatcattctcagaaactgctctgcgatgtgtgcgttcaactctcagagtttaacttttcttttcattcagcagtttggaaacactctgtttgtaaagtctgcacgtggatattttgaccacttacaggccttcgttggaaacgggtttttttcctgtaaggctagacagaagaattcccagtaacttccttgtgttgtgtgctttcaactcacagagttgaacgttcccttagacagagcagatttgaaacactctatttgtgcaatttgcaagtgtagatttcaagcgctttaaggtcaatggcagaaaaggaaatatcttcgtttcaaaactagacagaatcattcccacaaacagcgttgtgatgtgttcgttcaactcacagagtttaacctttcttttcatagagcagttaggaaagagtctgtttgtcaattctgtaagtggatattctgacatcttgtggcattcgttggaaacgggatttcttcatattctgctagacagaagaattctcagtaacttccttgtgttgtgtgtattcaactcacagagttgaacgatcctttacacagagcagacttgaaacattctttttgtggaatttgcaagtggagatttcagccgctttgtggtcaatggtagaataggaaatatcttcctatagaaactagacagaatgattctcagaaacttctttgtgatgtgtgcgttcaactcacagagtttaacctttcttttcatagagcagttaggaaacactctgtttgtaaactctgcaagtggacattcagacctctttgaggccttcgttggaaacgggatttcttcatactgtgctagacagaagaattctcagaatcttccttgtgttgtgtgtattcaactcacacagttgaacgatcctttacacagagcagacttggaacactctttttgtggaatttgcaagtggagatttcagccgctttgaagtcaaatgtagaaaaggaaatatcttcctataaaaactagacagaatcattctcagaaaatcctctgtgatgtgtgcgttcaactctcagagtttaacttttcttttcattcagcagttcagaaacactctgtttgtaaagtctgcacgtggatattttgaccacttagaggccttcgttggaaacgggtttttttcatataagggtagacaggagaattcccagtaacttccttgtgttgtgtgcattcaactcacagagttgaacgttcccttagacagagcagatttgaaacactctatttgtgcaatttgcaagtgtagatttcaagcgctttaaggtcaacggcagaaaaggaaatatcttcgtttcaaaactagacagaatcattcccacaaactgcgttgtgatgtgttcgttcaactcacagagtttaacctttctgttcatagagcagttaggaaacactctgtttgtaaagtctgtaagtggatattcagacatcttgtggccttcgttggaaacgggatttcttcatattctgctagacagaagaattgtcagaaacttccttgtgttgtgtgtcttcaactcacagagttaaacgatgctttacacagagtagacttgaaacactctttttctggaatttgcaagtggagatttcagccgctttgaggtcaatggtagaaaaggaaatatcttcgtataaaaactagacagaatgattctcagaaactcctttgtgatgtgtgcgttcaactcacagagtttaacttttcttctcatagagcagttaggaaacactctgtttgtaaagtctgcaagtggatattcagacctctttgaggtcttcgttggaaacgggatttcttcatattatgctagacagaagaattctcagtaacttccttgtgttgtgtgtattcaactgacagagttgaactttcatttagacagagcagatttgaaacactctttttccggaatttgcaagtggagatttcaagcgctttgaggccaaaggcagaaaaggaaatatcttcgtataaaaactagacagaatcattctcagaaactgctctgtgatgtgtgcgttcaactctcagagtttaacttttcttttcattcagcagtttggaaacactctgtttgtaaagtctgcacgtggatattttgaccacttagaggccttcgttggaaacgggtttttttcatgtaaggctagacagaagaattcccagtaatttccttgtattgtgtgcattcaactcacagagttgaacgttcccttagacagagcagatttgaaacactctatttgtgcaatttgcaagtgtagatttcaagcgctttaaggtcaatggcagaaaaggaaatatcttcgtttcaaaactagacagaatcattcccacaaactgcgttgtgatgtgtgcgttcaactcacagagtttaacctttcttttcatagagcagttaggaaacagtctgtttgtcaattctgtaagtggatattctgacatcttgtggccttcgttggaaacgggatttcttcatattctcctagacagaagaattctcagtaacttccttgtgttgtgtgtattcaactcacagagttgaacgatcctttacacagagcagacttgaaacactctttttctggaatttgcaagtggagatttcagccgctttgaggtcaatggtagaataggaaatatctttctatagaaactagacagaatgattctgagaaactcctttgtgatgtgtgcgtacaactcacagagtttaacctttcttttcatagagcagttgggaaacactccgtttgtaaactctgcaagtggatattcagacctccttgaggccttcgttggaaacgggatttcttcatattatgctagacagaagaattctcagtaacttccttgtgttgtgtgtattcaactgacagcagttgaactttcatttagagagagcagatttgaaacactgtttttgtggaatttgcaattggagatttcaagcgctttggggccaaaggcagaaaaggaaatatcttcgtataaaaactacacagaatcattctccgaaactgctctgcgatgtgtgcgttcaactctcagagtttaacttctcttttcattcagcagtttggaaacactctgtttgtaaagtctgcacgtggataacttgaccacttagaggccttcgttggaaacgggtttttttcatgtaaggctagacagaagaattctcagtaacttccttctgttgtgtgtattcatctcacagagttgaacgatcctttacacagagcagacttgtaacactctttttgtgcaattggcaaatggagatgtcaagcgctttaaggtcaattgcagaaaagaaaatatcttcgtttcaaaactagacagaatgattctcagaaacttctttgtgatgtgtgcgttcaactcacagagtttaaccttatttttcatagagcagttaggaaacactctgtttgtaaactctgcaagtggatattcagacctctttggggccttcgttggaaacgggatttcttcatactatgctagacagaagaattctcagtaacttccttgtgttgtgtgtattcaactcacagagttgaacgatcctttacacagagcagacttgaaacactctttttgtggaatttgcaagtggagatttcaagcgctttgaggccaaaggcagaaaaggaaatatcttcgtataaaaactagacagaatgattctcagaaacttctttgtgatgtgtgtgttcaactcacagagtttaacctttcttttcatagagcagttaggaaacactgtgtttttaaactctgcaagtggatattcagacctctttgaggcctttccttggaaacgggtttcttcatactgtgctagacagaagaattctcagtaacttccttgtgttgtgtgtattcaactgacagagttgaactttcatttagagagagcagatttgaaacactgtttttgtggaatttgcaagtggagatttcaagcgctttggggccaaaggcagaaaaggaaatatcttcgtataaaaattagacagaatcattctcagaaactgctgcgtgatgtgtgcgttcaactctcagagtttaacttttcttttcattcagcggtttggaaacactctgtttgtaaagtctgcacgtggatattttgcccacttagaggccttcgttggaaacgggtttttttcatgtaaggctagacagaagaattcccagtaacttccttgtgttgtgtacattcaactcacagagttgaacgttcccttagacagagcagatttgaaacactctttttgtgcaattggcaaatggagatttcaagcgctttaaggtcaatggcagaaaagggaatatcttcgtttcaaaactagacagaatcattcccacaaactgcgttgtgatgtgttcgttcaactcacagagtttaacctttctgttcatagagcagttaggaaacactctgtttgtaaagtctgtaagtggatatcctgacatcttgtggccttcgttggaaaagggatttcttcatattctgctagacagaagaattctcagaaacttcctggtgttgcgtgttttcaactcacagagttctacgatcctttacacagagtagacttgaaaaactctttttgttgaattggccagtggagatttcagccgctttgaggtcaatggtagaaaaggaaatatcttcgtataaaaactagacagaatgattctcagaaactcctttgtgatgtgtgcgttcaactcacagagtttaacctttcttttcatagagcagttaggaaacactctgtttgtaaagtctgcaagtggatattcagacatctttgaggctttcgttggaaacgggatttcatcatattctgctagacagaagaattcccagtaacttccttgtgttgtgtgtgttcaactcacagagttgaactttcatttacacagagcagatttgaaacactctttttgtggaatttgcaagtggagatttcaagcgctttgaggccaaagcagaaaaggaaatatcttcgtttcaaaactagacagaatcattctcagaaactgctgcgtgatgtgtgcgttcaactctcagagtttaacttttcttttcattcagcggtttggaaacactctgtttgtaaagactgcacgtggatattttgaccccttagaggtcttcgttggaaacgggtttttttcatgtaaggctagacagaagaattcccagtaacttccttgtgttgtgtgcattcaactcacagagttgaacgttcccttagacagagcagatttgaaacactctatttgtgcaatttgcaagtgtagttttcaagctctttaaggtcaacggcagaaaaggaaatatcttcgtttcaaaactagacagaatcattcccacaaactgcgttgtgatgtgttcgttcaactcacagagtttaacctttgttttcatagaggagttaggaaacagtctgtttgtaaattctgtaagtggatattctgacatcttgtggccttcgttggaaacgggatttcttcatattctgctagacagaagaattctcagttacttccttgtgttgtgtgtattcaactcaaagagttcaacgatcctttctacagggcagacttgaaacactctttttgtggaatttgcaagtggagatctcagccgctttgtggtcaatagtagaaaaggaaatatcttcgtataaaaactagacagaatgattctcagaaactcccttgtgatgtgtgcgttcaactcacagagtttaacctttcttttcatagagcagttaggaaacactctgtttgtaaagtctgcaagtggatattcagacttctttgaggccttcgttggaaacgggatttcttcatattctgctagacagaagaattctcagtaacttccttgtgttgtgtgtattcaactgacagagttgaactttcatttagagacagcagatttgaaacactgtttttgtggaagttgcaagtggagatttcaagcgctttggggccaaaggcagaaaaggaaatatcttcgtataaaaactagacagaatcattctcagaaaatgctctgtgatgtgtgcgttcaactctcagagtttaacttttcttttcattcagcagtttggaaacactctgtttgtaaagtctgcacgtggatattttgaccacttagaggccttcgttggaaacgggtttttttcatgtaagggtagaaagaagaattcccagtaacttccttgtgttgtgtgcattcaactcacagagttgaacgttcctttagacagagcagatttgaaacactctatttgtgcaatttgcaagtgtagttttcaagctctttaaggtcaacggcagaaaaggaaatatcttggtttcaaaactagacagaatcattcccacaaactgcgttgtgatgtgttcgttcaactcacagagtttaacctttcttttcatagaccagttaggaaacagtctgtgtgtaaattctgtaagtggatattctgacatcttgtggccttcgttggaaacgggatttcttcatattctgctagacagaagaattctcagaatcttccttgtgttctgtgtattcaactcacagagttgaacgatcctttacacagagcagacttgaaacactctttttgtggaatttgcaagtggagatttcagccgctttgaggtccatggtagaaaaggaaatatcttcgtataaaaactagacagaatgattctcagaaacttcattgtgatgtgtgcgttcaactcacagagtttaacctttcttttcatagagcagttaggaagcactctgtttgtcaactctgcaagtggatattcagacctctttgaggccttcgttggaaacgggatttcttcatactgtgctagacagaagaaatctcactaacttccttgtgttgtgtgtattcaactcacagagttgaacgatcctttacacagagcggacttgaaacactcattttgtggaatttgcaagtggagatttcagccgcgttgaggtcaatggtagaaaaggaaatatcttcgtataaaaactagacagaatcattctcagaaactgctgcgtgatgtgtgcgttcaactctcagagtttaacttttcttttcattcagcggtttggaaacactctgtttgtaaagtctgcacgtggatattttgaccacttagaggccttcgttggaaacgggtttttttcatgtaaggctagacagaagaattcccagtaacttccttgtgttgcgtgcattcaactcacagagttgaacgttcccttagacagagcagatttgaaacactctatttgtgcaatttgcaagtgtagatttcaagcgctttaaggtcaacggcagaaaaggaaatatcttcgtttcaaaactagacagaatcattcccacaaactgcgttgtgatgtgttcgttcaactcacagagtttaacctttcttttcatagtgcagttaggaaacagtctgtttgtaaattctgtaagtggatattctgacatcttgtggccttcgttggaaacgggatttcttcatattctgctagacagaagagttctcagtaacttccttgtgttgtgtgtattcaactcacagagttgaacgatcctttacacagagcagacttgtaacactctttttgtggaatttgcaagtggagatttcagccgctttgaagtcaaaggtagaaaaggaaatatcttcctataaaaactagacagaatgattctcagaaactcctttgtgatgtgtgcgttcaactcacagagtttaacctttcttttcatagagcagttaggaaacactctgtttgtaaagtctgcaagtggatattcagacctctttgaggcctccgttggaaacgggtttttttcatataaggctagacagaagaattccccagtaacttcccttgtgttgtgtgtgttcaactcacagagttgaactttcatttacacagagcagatttgaaacactctttttgtggaatttgcaggtggagatttcaagcgctttgaggccaaaggcagaaaaggaaatatcttcgtataaaaactagacagaatcattctcagaaactgctctgcgatgtgtgcgttcaactctcagagtttaacttttcttttcattcaacagtttgaaaacactctctttgtaaagtctgcacgtggatattttgaccacttagaggccttcgttggaaacgggtttttttcttgtaaggctagacagaagaattcccagtaacttccttgtgttgtgtgcattcaactcacagagttgaaccttcccttagacagagcagatttgaaacactctatttgtgcaatttgcaagtgtagatttcaagcgctttaaggtcaatggcagaaaaggaaatatcttagtttcaaaactagacagaatgattctcagaaactcttttgtgatgtgtgcgttcaactcacagagtttaacctttctgttcatagagctggtaggaaacactctgtttgtaaagtttgcaagtggatattcagacctccttgaggccttcgttggaaacgggatttcttcatattctgctagacagaagaattctcagtaacttccttgtgttgtgtgttttcaactcacagagttgaacgatcctttacacagagcagacttgaaacactctttttgtggaatttgcaagtggagatttcagccgctttgaggtcaatggtagaataggaaatatcttcctgtagaaactagacagaatgattctcagaaactcctttgagatgtgtgcgttcaactcacagagtttaacctttcttttcatagagcagttaggaaacactctgtttgtaaagtctccaagtggatattcagacctctttgaggccttcgttggaaacgggtttttttcatataaggctagacagaagaattctcagtaacttccttctgttgtatgtattcaactgacagagttgaactttcatttagagagagcagatttgaaacactgtttttgtggaatttgcaagtggagatttcaagcgcttcggggccaaaggcagaaaaggaaatatcttcgtataaaaactagacagaatcattctcagaaactgctgcgtgatgtgtgggattacctctcagagttttacttttcttttcattcagcggtttggaaacactctgtttgtaaagtctgcacgtggatattttgaccacttagaggccttcgttggaaacgggtttttttcatgtaaggctaaacagaagaattcccagtaacttccttgtgttgtgtacattcacctcacagagttgaacgttcccttagacagagcagatttgaaacactctttttgtgcaattggcaaatggagatttcaagcgctttaaggtcaatggcagaaaaggaaatatcttcgtttcaaaactagacagaatcattcccacaaactgcgttgtgatgtgttcgttcaactcacagagtttaacctttcttttcatagagcagttaggaaacagtctgtttgtcaattctgtaagtggatattctgacatcttgtggccttcgttggaaacgggatttcctcatattctgctagacagaagaattcccagtaacttccttgtgttgtgtacattcaactcacagagttgaacgttcccttagacagagcagacttgtaacactctttttgtggaatttgcaagtggagatttcagccgctttgaagtcaaatgtagaaaaggaaatatcttcctataaaaactagacagaatgattctcagaaactcctttgtgatgtgtgtgttcaactcacagagtttaacgtttcttttcatagagcagttagtaaacactcagtttataaagtctgcaagtggatattcagacccctttgaggccttcgttggaaacgggatttcttcatattatgctacacagaagaattcccagtaacttccttgtgatgtgtgtgttcaactcacagagttgaactttcatttacacagagcagattggaaacactctttttgtggaatttgcaagtggagatttcaagcgctttgaggccaaaggcagaaaaggatatatcttcgtataaaaactacacagaatcattctcagaaactgctctgcgatgtgtgcgtacaactctcagagcttaacttttcttttcattcagcagtttggaaacactctgtttgtaaagtctgcacgtggataatttgaccacttagagaccttcgttggaaacgggtttttttcatgtaaggctagacagaagaattcccagtaacttccttgtgttgtgtacattcaactcacagagttgaaggttcccttagacagagcagatttgaaacactctttttgtgcaattggcaagtggagatttcaagcgctttaaggtcaatggcagaaaaggaaatatcttcgtttcaaaactagacagaataattctcagaaactcctttgtgatgtgtgcgttcaactcacagagtttaacctttcttttcatagagcagttcggaaacactctgtttgtaaagtctgcaagtggatattcagacctccctgaggccttctttggaaacgggatttcttcatattatgctagacagaagaattctcagtaacttccttgtgttgtgtgtattcaactcacagagttgaacaatcctttacacagagcagacttgaaacactctttttgtggaatttgcaagtggagatttcagccgctttgaggtcaatgttagaataggaaatatcttcctatagaaactagacagaacgattctcagaaactcctttgtgatgtgtgcgttcaactcacagagtttaacctttcttttcatagagcagttaggaaacactctgtttgtaacgtctgcaagtggatattcagacctccttgaggccttcgttggaaacgggatttcttcatattctgctagacagaagaattcccagtaacttccttgtgttgtgtgtgttcaactcacagagttgaactttcatttacacagagcagatttgaaacactctttttgtggaatttgcaaatggagatttcaagcgctttgaggccaaaggcaggaaaggaaatatcttcgtataaaaactagacagaatcattctcagaaactgctctgcgatgtgtgcgttcaactctcagagtttaactttgcttttcattcagcagtttggaaacactctgtttgtaaagtctgcacctggataatttgaccacttagaggccttcgttggaaacgggtttttttcatgtaaggctagacagaagaattcccagtaacttccttgttttgcgtgtgttcaactcacagagttgaactttcatttacacagagcagatttgaaacactctttttgtggaatttgcaagtggagatttcaagcgctttgagggcaaaggcagaaaaggaaatatcttcgtttcaaaactagacagaatcattcccacaaactgcgttgtgatgtgttcgttcaactcacagagtttaacctttcttttcatagagcagttaggaaacactctgttggtaaattctgtaagtggatattctgacatcttgtggccttcgttggaaacgggatttcttcatcttctgctagacagaacaattctcagtaacttccttgtgttgtgtgtattcaactcacagagttgaatgatcctttacacagaacagtcttgaaacactctttttgtggaatttgcaagtggagatttcagccgctttgaggtccatggtagaataggaaatatcttcctatagaaactagacagaatgattctcagaaactcctttgtgatgtgtgcgttcaactcagagagtttaacttttcttttcatagagcagttaggaaacactctgtttgtaaagtctgcaagtggatattccgacctctttgaggccttcgttggaaacgggatttcttcatattatgctagacagaagaattcccagtaacttccttgtgttgtgtgtgttcaactcacagagttgaactctcatttacacagagcagatttgaaacactctttttgtggaatttgcaagtggagatttcaagcgctttgaggtcaaaggcagaaaaggaaatatcttcgtataaaaactagacagaatcattctcagcaactgctgcgtgatgtgtgcgttcaactctcagagtttaccttttcttttcattcagcggtttggaaacactatgtttgtaaagtctgcacgtggatattttgaccacttagaggccttcgttggaaacgggattttttcatgtaaggctagacagaagaattcccagtaacttccttgcgttgtgtacattcaactcacagagttgaacgttcccttagacagagcagatttgaaacactctttttgtgcaattggcaagtggagatttcaagcgctttaaggtcaatggcagaaaaggaaatatcttcgtttcaaaactagacagaatcattcccacaaactgcgttgtgatgtgttcgttcaactcacagagtttaacctttcttttcatagagcagttaggaaccagtctgtttgtaaattctgtaagtggatattctgacatcttgtgaccttcgttggaaacgggatttcttcatattctgctagacagaagaattctcagtaacttccttgtgttgtgtgtattgaactcacagagttgaacgatcctttacacagagcagacttgaaacattctttttgtggaatttgcaagtggagatttcagccgctttgaggtcaatggtagaataggaaatatctttctatagaaactagacagaatgattctgagaaactcctttgtgatgtgtgcgttcaactcacagagtttaacctttcttttcatagagcagttaggaaacactctgtttgtaaagtctgcaagtggatattcagacctctttgaggccttcgttggaaacgggatttcttcatattctgctagacagaagaattctcagtaacttccttgtgttgtgtgtattcaactgacagagttgaactttcatttagagagagcagatttgaaacactgtttttgtggaatttgcaagtgtatatttcaagcgctttggggccaaaggcagaaaaggaaatatcttcgtataaaaactagacagaatcattctcagaaactgctctgcgatgtgtgcgttcaactctcagagtttaacttttcttttcattcagcagtttggaaacactctgtttgtaaagtctgcacctggataacttgaccacttagaggcctccgttggaaacgggtttttttcctgtaaggctagacagaagaattcccagtaacttccttgtgttgtgtacattcaactcacagagttgaacgttcccttatacagagcagatttgaaaaactctttttatgcaattggcaagtggtgatttcagccgctttgaggtcaatggtagaaaaggaaataacttcgtataaaaattagacagaatcattcccaaaaactgcgttgtgatgtgttcgttcatctcacagagtttaacctttcttttcatagagcagttaggaaacagtctgtttgtaaattctgtaagtggatattctgacatcttgtggccttcgttggaaacgggatttcttcatattctgctagacagaagaattctcaggaacttccttgtgttgtgtgaattcaactcacagagttcaacgatcctttacacagagcagacttgaaacactctttttgtggaatttgcaagtggagatttcagccgcttttaggtcaatggtagaataggaaatatcttcctatagaaactagacagatgattctcagaaactcctttgtgatgtgtgcgttcaactcacagagtttaacctttcttttcttagagcagttaggaaacactctgtttataatgtctgcaagtggatattcagacccctttgaggccttcgttggaaacgggatttcttcatattatgctagacagaagaattctcagtaacttccttgtgttgtgtgtattcaactgacagagttgaactttcatttagagagagcagatttgaaacactgttgttgtggaatttgcaagtggagatttcaagcgctttgggaccaaaggcagaaaaggaaatatcttcgtataaaaactagacagaatcattctcagaaactgctgcgtgatgtttgcgttcaactctcagagtttaacttttcttttcattcagcggtttggaaacactctgtttgtaaagtctgcacgtggaaattttgaccacttagaggccttcgttggaaaagggtttttttcatgtaaggctagacagaagaattcccagtaacttccttgtgttgtgtacattcaactcacagagttgaacgttcccttagacagagcagatttgaaacactctttttgtgcaattggcaaatggagatttcaagcgctttaagttcaatggcagaaaaggaaatatcttcgtttcaaaactagacagaatcattcccacaaactgcgttgtgatgtgttcgttcaactcacagagtttaaactttctgttcatagagcagttaggaaacactctgtttgtaaagtctgtaagtggatattccgacatcttttggccttcgttggaaacgggatttcttcatattctactagacagaagaattctcagtaactcctttgtgttgtgtgtattcaactcacagagttgaacgatcctttacacagagcagacttgaaacactctttttgtggaatttgcaagtggagatttcagccgctttgaggtcaatggtagaataggaaatatcttcctatagaaactagacagaatgattctcagaaacttctttgtgatgtgtgcgctcaactcacagagtttaacctttcttttcatagagcagttaggaaacactctgtttgtaaactctgcaagtggatattcagacctctttgaggccttcgttggaaacgggatttcttcatattatgcctgagagaagaattctcagtaacttccttgtgttgtgtgtattcaactcacagagttgaacgatcctttacacagagcagacttggaacactctttttgtggaatttgcaagtggagatttcagccgcgttgagatcaatggtagaaaaggaaatatcttcgtataaaaactagacagaatgattctcagaaactcctttgagatgtgtgtgttcaactcacagagtttaacctttcttttcatagagcagttaggaatcactctgtttgtaaagtctgcaagtggatattcagacctctttgaggccttcgttggaaacgggtttttttcatataaggctagacagaagaattctcagtaacttccttgtgttgtgtgtattcaactgacagagttgaactttcatttagagagagcagatttgaaacactgtttttgtggaatttgcaagtggagatttcaagcgctttgtggccaaaggcagaaaacgaaatatcttcgtataaaaactagacagaatcattctcagaaactgctgcgtgatgtgtgcgttcaactctcagagtttaacttttcttttcattcagcggtttggaaacactctgtttgtaaagtctgcacgtggacattttgaccacttagaggccttagttggaaacgggtttttttcatgtaaggctagacagaagaattcccagtaacttccttgtgttgtgtacattcaactcacagagttgaacgttcccttagacagagcagatttgaaacactctttttgtgcaattggcaagtggagatttcaagcgctttgaggtcaatggcagaaaaggaaatatcttcgtttcaaaactagacagattcattcccacaaactgcgttgtgatgtgttcgttcaactcacagagtttaacctttctgttcatagagcagttaggaaacactctgtttgtaaagtctgccagtggatattcagacctccttgaggccttcgttggaaacgggatttcttcatattctgctagacagaagaattctcagtaacttccttgtgttgtgtgtattcaactcacagagttgaacgatcctttacagagagcagacttgaaacactctttttgtggaaattgcaagtggagatttcagctgctttgaggtcaatggtagaataggaaatatcttcctatagaaactagacagaatgattctcagaaactcctttgtgatgtgtgcgttcaactcacagagtttaacctttcttttcatagagcagttaggaaacactctgtttgtaaagtctgcaagtggatattcagacctccttgagggttcgttggaaacgggatttcttcatattatgctagacagaagaattcccagtaacttccttgtgttgtgtgtgttcaactcacagagttgaactttcatttacacagagcagatttgaaacactctttttgtggaatatgcaagtggagatttcaagcgctttgaggccaaaggcagaaaaggaaatatcttcgtttgaaaactagacagatatcattctcagaaactgctgcgtgatgtgtgcgttcaactctcagagtttaacttttcttttcattcagcggtttggaaacactctgtttgtaaagtctgcacgtggatattttgaccacttagaggccttcgttggatacgggttttttttcatgtaaggctagacagaagaattcccagtaacttccttgtgttgtgtgcattcaactcacagagttgaacgttcccttagacagagcagatttgaaacactctatttgtgcaatttgcaagtgtagatttcaagcgctttaaggtcaacggcagaaaaggaaatatcttcgtttcaaaactagacagaatcatacccacaaactgcgttgtgatgtgttcgttcaactcacagagtttaacctttctgttcatagagcagttaggaaacactctgtttgtaaagtctgtaagtggatattctgacatcttgtggccttcgttggaaacgggatttcttcatattctgctagacagaagaattctcagaatcttccttgtgttgtgtgtattcaactcacagagttgaacgatcctttacacagagcagacttgaaacactctttttgtggaatttgcaagtggagatttcagccgctttgaggtccatggtagaaaaggaaatatcttcggtataaaaactagacagaatgattctcagaaactcctttgagatgtgtgtgttcaactcacagagtttaacctttcttttcatagagcagttaggaatcactctgtttgtaaagtctgcaagtggatattcagacctctttgaggccttcgttggaaacgggtttttttcatataaggctagagagaagaattcccagtaacttccttgtgttgtgtgtgttcaacccacagagttgaacttccatttacacagagcagatttgaaacactctttttgtggaatttgcaagtggagatttcaagcgctttgaggccaaaggcagaaaaggaaatatcttcgtttcaaaactagacagaatcattctcagaaactgctctgcgatgtgtgcgttcaactctcagagtttaacttttcttttcattcagcagtttggaaacactctgtttgtaaagtctgcacgtggataatttgaccacttagaggccttctttggaaacgggtttttttcatataaggctagacagaagaattcccagtaacttccttgtgttgtgtacattcaactcacagagttgaacgttcccttagacagagcagatttgaaacactctttttgtgcaattagcaagtggagatttcaagcgctttaaggtcaatggcagaaaaggaaatatcttactttcaaaactagacagaatgattctcagaaacttctttgtgatgtgtgcgttcaactcacagagtttaacctttcttttcatagagcagttaggaaacactctgtttataaactctgcaagtggatattcagacctctttgaggccttcgttggaaacgggatttcttcatactgtgctagacagaagaattctcagtaacttccttgtgttgcgtgtattcaactcacagagttgaacgatcctttacacagagcgggcttgaaacactctttttgtggaatttgcaagtggagatttcagccgcgttgaggtcaatggtagaaaaggaaatatcttcgtataaaaactagacagaatgattctcataaactcctttgtgatgtgtgaattcaactcacagagtttcacctttcttttcatagagcagttaggaaacactctgtttgtaaagtctgcaagtggatattcagacctccttgaggccttcgttggaaacgggatttcttcatattctgctagacagaagcaattcccactaacttccttgtgttgtgtgtgttcaactcacaggagttgaactttcatttacacagagcagatttgaaacactctttttgtggaatttgaaagtggagatttcaagcgctttgaggccaaaggcagaaaaggaaatatcttcgtttcaaaactagacagaatcattctctgaaactgctgcgtgatgtgtgcgttcaactctcaaagtttaacttttcttttcattcagctgtttggaaacactctgtttgtaaagtctgtacgtggaaattttgaccacttagaggccttcgttggaaacgggtttttttcatgtaaggctagacagaagaattcccagtaacttccttgtgttgtgtacattcaactcacagagttgaacgttcccttagacagagcagatttgaaacactctttttgtgcaattggcaagtggagatttcaagcgctttaaggtcaatggcagaaaaggaaatatcttcgtttcaaaactacacagaatgattctcagaaactcctttgtgatgtgtgcattcaactcacagagtttaacctttcttttcatagagcagttaggaaacactctgtttgtaaagtctgcaagtggatattcagacatctttgaggctttcgttggaaacgggatttcttcatattctgctagaaagaagaattctcagtaacttccttgtgttgtgtgtattcaactcacagacttgaatgatcctttacacagaacagtcttgaaagactctttttgtggaatttgcaagtggagatttcagccgctttgaggtcaatggtagaataggaaatatcttccaatagaaactagacagaatgactctcagaaactcctttgtgatgtgtgtgttcaactcacagagtttaacctttcttttcatagagcagttagtaaacactctgtttataaagtctgcaagtggatattcagacccctttgaggccttcgttggaaacgggatttcttcatattctgctagacagaagaattcccagtaacttccttgtgttgtgtgtgttcaactcacagagttgaactttcatttacacagagcagatttgaaacagtctttttgtggaatttgcaagtggagatttcaagcgctttgaggccaaaggcagaaaaggaaatatcttcgtataaaaactagacagaatcattctcagaaactgctgcgtgatgtgtgcgttcaactctcagagtttaacttttcttttcattcagcggtttggaaacactctgtttgtaaagtctgcacgtggatattttgaccactcagaggccttcgttggaaacgggtttttttcatgtaaggctagacagaagaattcccagtaacttccttgtgttgtgtacattcaactcacagagttgaacgttcccttagacagaacagatttgaaacactctttttgtgcaattggcaagtggtgatttcagccgctttggggtcaatggtagaaaaggaaatatcttcgtataaaaactagacagaatgattctcagaaactcctttgtgatgtgtgcgttcaactcacagagtttaacctttcttttcatagagcagttaggaaacactctgtttgtaaagtctgcaagtggatattcagacctctttgaggccttctttggaaacggcatttcttcatattatgctagacagaagaattctcagtaacttccttgtgttgtgtgtatgcaactcacagagttgaacgatcctttacacagagcagacttgaaacactctttttgtggaatttgcaagtggagatttcagccgctttgaggtcaatggtagaataggaaatatcttcctatagaaactagacagaatgattctcataaactcctttgtgatgtgtgcgttcaactcacagagtttaacctttcttttcatagagcagttaggaaacactctgtttgtaaagtctgcaagtggatattcagacctccttgagaccttcgttggaaacgggatttcttcatattatgctagacagaggaattctcagtaacttccttgtgttgtgtgtattcaactgacagagttgaactttcatttagagagagcagatttgaaacactgtttttgtggaatttgcaagtggagatttcaagcgctttggggccaaaggcagaaaaggaaatatcttcgtataaaaactagacagaatgattctcagaaactgctctgcgatgtgtgcgttcaactctcagagtttaacttttcttttcattcagcagtttggaaacactctgtttgtaaagtctgcacgtggatattttgaccacttggaggccttcgttggaaacgggtttttttcctgtaaggctagacagaataattcccagtaacttccttgtgttgagtacattcaactcacagagttgaacgttcccttagacagagcagatttgaaacactctttttgtgcaattgacaagtggagatttcaagcgctttaaggtcactggcagaaaaggaaatatcttcgtttcaaaagtagacagaatgattcccacaaactgcgttgtgatgtgttcgttcaactcacagagtttaacctttcttttcatagagcagttaggaaacactctgtttgtaaattctgtaagtggatattctgaaatcttgtggccttcgttggaaacgggatttcttcatattctgctagacagaagaattcccagtaacttccttgtgttgtgtacattcaactcacagagttgaacgttcccttagacagagcagacttgtaacactctttttgtgcaatttgcaagtggagatttcagccgctttgaagtcaaaggtagaaaaggaaatatcttcctataaaaactagacagaatgattctcataaactcatttgtgatgtgtgcattcaactcacagagtttcacctttcttttcatagagcagttaggaaacactctgtttgtaaagtctgcaagtggatattcagacctccttgaggccttcgttggaaacgggatttcttcatattctgctagacagaagaattctcagtaacttccttgtgttgtgtgtattcaactgacagagttgaactttcatttagagagagcagatttgaaacactgtttttttggaatttgcaagtggagatttcaagcgcttttgggccaaaggcagaaaaggaaatatcttcgtataaaaactagacagaatgattctcagaaactcctttgtgatgtgtgcattcaactcacagagtttaaccattcctttcatagagcagttaggaaacactctgtttgtaaagtctgcaagtggatattcagacctctttgaggccttcgttggaaacgggatttcttcatattctgctagacagaagaattctcagtaacttccttgtgttgtgtgtattcaactcacagagttgaacgatcctttacacagagcagacttgaaacactctttttgtggaatttgaaagtggagatttcagccgctttgaggtcaatggtagaaaaggaaatatcttcgtataaaaactagacagaatgattctcagaaactcctttgtgatgtgtgcgttcaactcacagagtttaacctttcttttcatagagcagttaggaaacactctgtttgtaaagtctgcaagtggatattcagacctccttgaggctttcgttggaaacgggatttcttcatattctgctatacagaagaattctcagaaacttccttgtgttgtgtgttttcaactcacagagttgaacgatgctttacacagagtagacttgaaacactcttgttgtggaatttgcaagtggagatttcagccgctttgaggtcaatggtagaataggaaatatcttcctatagaaactagacagaatgattctcagaaactcctttgtgatgtgtgtgttcaactcacagagtttaacctttcttttcatagagcagttagtaaacactctgtttataaagtctgaaagtggatattcagacccctttgaggccttcgttggaaaagggatttcttcatattatgctagacagaagaattcccagtaacttccttgtgttgtgtgtgttcaactcacagagttgaactttcatttacacagagcagatttgaaacactctttttgtggaatttgcaagaggagatttcaagcgctttgaggccaaaggcagaaaaggaaatatcttcgtataaaaactagacagaatcattctcagaaactgctctgcgatgtgtgcgttcaactctcagagtttaacttttcttttcattcagaagtttggaaacactctgtttgtaaagtctgcacgtggataacttgaccacttagaggccttcgttggaaacggttttttttcatgtaaggctagacagaagaattcccagtaacttccttgtgttgtgtacattcaacacacagagttgaacgtttccttagagagagcagatttgaaacactctttttgtgcaattggcaagtggtgatttcagccgctttgaggtcaatggtagaaaaggaaatatcttcgtataaaaactagacagaatcattcccacaaactgcgttgtgatgtgttcgttcatctcacagagtttaacctttcttttcgtagagcagttaggaaacagtctgtttgtaaattctgtaagtggatattctgacatcttgtggccttcgttggaaacgggatttcttcatattctgctagacagaggaattctcagaatcttccttgtgttgtgtgtattcaactcacagagttgaacgatcctttacacagagcagacttgaaacactctttttgtggaatttgcaagtggagatttcagccgctttgaggtccatggtagaaaaggaaatatcttcgtataaaaactagacagaatgattctcagaaactcctttgtgatgtgtgcgttcaactcacagagtttaacctttcttttcatagagcagttaggaaacactctgtttgtaaagtctgcaagtggatattcagacctctttgaggccttcgttggaaacgggtttttttcctgtaaggctagacagaagaattcccagtaacttccttgtgttgtgtacattcaactcacagatttgaacgttcccttagacagagcagatttgaaacactctttttgtgcaattggcaagtggagatttcaagcgctttaaggtcaatggcagaaaaggaaatatcttcgtttcaaaactagacagaatcattcccacaaactgcgttgtgctgtgttcgttcaactcacagagtttaacctttgttttcatagagcagttaggaaacagtctgtttgtaaattctgtaagtggatattctgacatcttgtggccttcgttggaaacgggttttcttcatattctgctagacagaagaattcccagtaacttccttgtgttgtgtacattcaactcacagagttgaacgttcccttagacagagcagatttgaaacactctttttgtgcaattggcaaatggagatttcaagcgctttaagttcaatggcagaaaaggaaatatcttcgtttcaaaactagacagaatcattcccacaaactgcgttgtgatgtgttcgttcaactcacagagtttaacctttccgttcatagagcagttaggaaacacactgtttgtaaagtctgtaagtggatattctgacatcttgtggccttcgttggaaacgggatttcttcatattctgctagacggaaggaattctcagtaacttccttgtgttgtgtgtattcaacttacagagttgaacgatttcttacacagagcagagttgaaacactctttttctggaatttgcaagtggagattacagccgctttgaggtcaatggtagaataggaaatatgttcctatagaaactagacagaacgattctcagaaactcctttgtgatgtgtgcgttcaactcacagagtttaacctttcttttcatagagcagttaggaaacactctgtttgtaaagtctgcaagtggatattctgacctctttgaggccttcgttggaaacgggatttcttcatattctgctagacagaagaattcccagtaacttccttgtgttgtgtgtgttcaactcacagagttgaactttcatttacacagagcagatttgaaacactctttttgtggaatttgcaagtggagatttcaagcgctttgagaccaaaggcagaaaaggaaatatcttcgtttcaaaactagacagaatcattctcagaaactgctctgtgatgtgtgcgttcaactctcagagtttaacttttcttttcattcagcagtttggaaacactcagtttgtaaagtctgcacgtggatattttgaccacttagaggtcttcgttggaaacgggtttttttcatgtaaggctagacagaagaattcacagtaacttccttgtgttgtgtacattcaactcacagagttgaacgttcccttagacagagcagatttgaaacactctttttgtgcaattggcaagtggagatttcaagcgctttaaggtcaatggcagaaaaggaaatatcttcctttcaaaactagacagaatgattctcagaaactcctttgtgatgtgtgcgttcaactcacagagtttaacctttcttttcatagagcagttaggaaacactctgtttgtaaagtctgcaagtggatatgcagacatccttgaggctttcgttggaaacgggatttcttcatattctgctagaaagaagaattctcagtaacttcctcgtgttgtgtgtattcaactcacagagttgaacgatcctttacacagagcagacttgaaacactctttttgtggaatttgcaagtggagatttcagccgctttgaggtcaatggtagaataggaaatatcttcctatagaaactagacagaatgattctcagaaactcctttgtgatgtgtgcgttcaactcacagagtttaacctttctgttcatagagcagttaggaaacactctgtttgtaaagtctgcaagtggatattcagacccctttgaggccttcgttggaaacgggatttcttcatattctgctagacagaagaattcgcagtaacttccttgtgttgtgtgtattcaactcacagagtttaacgatcctttacacagagcggacttgaaacactctttttgtggaatttgcaagtggagatttcagccgctttgaggtcaatggtagaaaaggaaatatcttcgtataaagactagacagaatgattctcataaactcctttgtgatgtgtgcgttcaactcacagagtttaacttttcatttcatagagcagttaggaaacactctgtttgtaatgtctgcaagtggatattcagacctctttgaggccttcattggaaacgggatttcttcatattatgctagacagaagaattctcagtaacttccttgtgttgtgtgtattcaactcacagagttgaacgatcctttacacagagcagacttggaacactctttttgtggaatttgcaagtggagatttctgccgcgttgaggtcaatggtagaaaaggaaatatcttcgtataaaaactagacagaatgattctcagaaactcctttgagatgtgtgtgttcaactcacagtttaacctttcttttcatagagcagttaggaatcactctgtttgtaaagtctgcaagtggatatacagacctctttgaggccttcgttggaaacgggtttttttcatataaggctagacagaagaattcccagtaacttccttgtgttgtgtgtgttcaactcacagagttgaactttcatttacacagagcagatttgaaacactctttttgtggaatttgcaagtggagatttcagccgctttgaagtcaaatgtagaaaaggaaatatcttcctataaaaactagacagaatgattctcagaaactcctttgtgatgtgtgcgttcaactcacagagtttaacctttcttttcatagagcagttagggaacactctgtttgtaaagtctgcaagtggatattcagacctctttgaggccttcgttggaaacgggatttcttcatattatgctagacagaagaattcccagtaacttgccttgtgttgtgtgtgttcaactcacagagttgaactttcatttacacagagcagatttgaaacactaattttgtggaatttgcaagtggagatttcaagcgctttgaggccaaaggcagaaaaggaaatatcttcgtataaaaactagacagaatcattctcagaaactgctgcgtgatgtgtgcgttcaactctcagagtttaacttttcttttcattcagcggtttggaaacactctgtttgtaaagtctgcacgtggatattttgaccacttagaggccttcgttggaaacgggtttttttcatgttaggctagacagaagaattcccaggaacttccttgtgttgtgtacattcaactcacagagttgaacgttcccttagacagagcagatttgaaacactctttttgtgcaattggcaagtggtgatttcagcagctttgaggtcaatggtagaaaaggaaatatcttcgtataaaaactagacagaatcattcccacaaactgcgttgtgatgtgttcgttcaactcacagagtttaacctttcttttcatagagcagttaggaaacagtctgtttgtcaattctgtaagtggatattctgacatcttgtggccttagttggaaacgggatttcttcatattctgctagacagaagaattctcagtaacttccttgtgttgtgtgtattcaactcacagagttgaacgatcctttacacagagcagacttgaaacactctttttgtggaatttgcaagtggagatttcagccgctttgggttcaatggtagaataggaaatatcttcctatagaaactggacagaatgattctcagaaactcctttgtgaagtgtgcgttcaactcacagagtttaacctttctttccatagagcagttaggaaacactctgtttgtaaagtctgcaagtggatattcagacctctttgaggccttcgttggaaacgggatttcttcatattctgctagacagaagaattctcagtaacttccttgtgttgtgtgtattcaactgacagagttgaactttcatttagagagagcagatttgaaacactgtttttgtggaatttgtaagtggagatttcaagcgctttggggccaaaggcagaaaaggaaatatcttcgtataaaaactagacagaatcgttctcagaaactgctctgcgatgtgtgcgttcaactctcagagtttaacttttcttttcattcagcagtttggaaacactctgtttctaaagtctgcacgtggataatttgaccacttagaggccttcgttggaaacgggtttttttcatgtaaggctagacagaagaattctcagtaacttccttgtgttgtgtgtattcaactcacagagttgaacgatcctttacaaagagcagatttgtaacactctttttgtggaatttgcaagtggagatttcaagcgctttaaggtcaatggcagaaaaggaaatatcttcgtttcaaaactagatagaatcattcccacaaactgcgttgtgatgtgttcgttcaactaacagagtttaacctttcttttcatagagcagttaggaaacagtctgtttgtaaattctgtaagtggataatctgacatattgtggcctttgttggaaacaggatttcttcttattctgctagacagaagaattctcagtaacttccttgtgttgtgtgtattcaactcacagagttgaacgatcctttacacagagcagacttgaaacactctttttgtggaatttgcaaatggagatttcagccgctttgaggtcaatggtagaataggaaatatcttcctatagaaactagacagaatgattctcataaactcctttgtgatgtgtgcgttcaactcacagagtttaacctttcttttcatagagcagttaggaaacactctgtttgtaaagtctgcaagtggatattcagaccctcttgaggccttcgttggaaacgggatttcttcatattctgctagacagaagaattctcagtaacttcccttgtgttgtgtgtgttcaactcacagagttgaactttcatttacacagagcagattggaaacactctttttgtggaatttgcaagtggagatttcaagcgctttgaggccaaaggcagaaaaggaaatatcttcgtataaaaactagacagaatcattctcagaaactgctctgcgatgtgtgcgttcaactctcagagttttactttgcttttcattcagcagtttggaaacactctgtttgtaaagtctgcacgtggataatttgaccacttagaggccttcgttggaaacgggtttttttcatgtaaggctagacagaagaattcccagtaacttccttgtgttgtgtacattcaactcacagagttgaacgttcccttagacagagcagatttgaaacactatttttgtgcaattggcaaatggagatttcaagggctttaaggtcaatggcagaaaaggaaatatcttcgtttcaaaactagacagaatgattctcataaactcctttgtgatgtgtgcgttcaactcacagagtttaacctttctgttcatagagcagttaggaaacactctgtttgtaaagtctgcaagtggatattcagacctccttgaggccttcgttggaaaagggatttcttcatattctgctagacagaagaattctcagtaacttccttgtgttgtgtgtattcaactcacagagttgaacgatcctttacacagagcagacttcaaacactctttttgtggaatttgcaagtggagatttcagccgctttgaggtcaatagtagaaaaggaaatatcttcgtagaaaaactaggcagaatgattcccagaaactcctttgtgatgtgtgcattcaactcacagagtttaacttttcttttcatagagcagttaggaaacactctgtttgtaaagtctgcaagtggatattcagacctctttgaggccttcgttggaaacgggatttcttcatattatgctagacagaagaattcccagtaacttccttgtgttgtgtgtgttcaactcacagagttgaactttcatttagacagagcagatttgaagcactctttttgtggaatttgcaagtggagatttcaagcgctttgaggccaaaggcagaaaaggtaatatcttcgtttcaaaactagccagaatcattctcagaaactgctctgcgatgtgtgcgttcaactctcagagtttaacttttcttttcattcagcagtttggaaacactctgtttgtaaagtctgcacgtggataatttgaccacttagaggccttcgttggaaacgggtttttttcatgcaaggctagacagaagaattcccagtaacttccttgtgttgtgtacattcaactcacagagttgaacgttcccttagacagagcagatttgaaacactctttttgtgcaattggcaagtggagatttcaagagttttaaggtcaatggcagaaaaggaaatatcttcgtttcaaaactagacagaatcattcccacaaactgcgttgtgatgtgttcgttcaaatcacagagtttaacctttcttttcatagagcagttaggaaacagtctgtttgtaaattctgtaagtggatattctgacatcttgtggccttcgttggaagcgggatttcttcatattctgctagacagaagaattctcagtaacttccttgtgttgtgtgtattcaactcacagaggtgaacgatcctttacagagagcagacttgaaacactctttttgtggaatttgcaagtggagatttcagccgctttgaggtcaatggtagaataggaaatatcttcctatagaaactagacagaatgattctcagaaactcctttgtgatgtgtgcgttcaactcacagagtttaaccttccttttcatagagcagttaggaaacactctgtttgtaaagtctgcaagtggatattcagacctctttgaggccttcgttggaaacgggtttttttcatataaggctagacagaagaattcccagtaacttccttgtgttgtgtgtgttcaactcacaaagttgaactttcatttacacagagcagatttgaaacactctttttgtggaatttgcaagtggagatttcaagcgctttgaggccaaaggcagaaaaggaaatatctccgtttcaaaactagacagaatcattctcagaaactgctctgtgatgtgtgcgttcatctcacagggtttaacttttcttttctttcagcagtttggcaacactctgtttgtaaaatctgcacgtggatattttgaccacttagaggccttcgttggaaacgagtttttttcatgtaaggcaatacagaagaattcccagtaacttcccttgtgttgtgtgcattcaactcacacagatgaacgttcccttagacagagcagatttgaaacactctatttgtgcaatttgcaagtgtagatttcaagcgctttaaggtcaatggcagaaaaggaaatatcttcgtttcaaaactagacagaatcattcccacaaactgcgttgtgatgtgttcgttcaactcacagagtttaacctttctgttcatagaccagttaggaaccactctgcttgtaaagtctgtaagtggatattctgacgtcttgtggccttaattggaaatgggatttcttcgtattctgctagacagagaattctcagtaactgccttgtgttgtgtgtattcaactcacagagttgaacgatcctttacacagagcagacttgaaacactctttttgtggaatttgcaagtggagatttcagccgctttgaggtcaatggtagaataggaaatatcttcctatagaaactagacagaatgattctcagtaagttctttgtgatgtgtgcgttcaactcacagggttcaacctttcttttcatagagcagttaagaaacactctgtttgtaaagtcttcaagtggatattcatacctctttgaggccctcgttggaaacgggatttcttcatattatgctagacagaagaattctcagtaacttccttgtgttgtgtgtattcaactgacagagttgaactttcatttagagagagcagatttgaaactctgtttttgtggaatttgcaagtggagatttcaagcgctttggggccaaaggcagaaaaggaaatatcttcgtataaaaactagacagaatcattctcagaaactgctctgcgatgtgtgcgttcaactctcagagtttaacttttcttttcattcagcagtttggaaacactctgtttgtaaagtctgcacgtggatattttgaccatttagaggccttcgttggaaacgggtttttttcttgtaaggctagacagaagaattcccagtaactttccttgtgttgtgtacattcaactcacagagttgaacgttcccttagacagagcagatttgaaacactctttttgtgcaattggcaaatggagatttcaagcgctttaagttcaatggcagaaaaggaaatatcttcgtttcaaaactagacagaatgattctcagaaactcctttgagatgtgtgcgttcaactcacagagtttaacctttcttttcatagagcagttaggaaacactctgtttgtaaactctgcaagtggatattcagacctctttgaggctttcgttggaaacgggatttcttcatactatgctagacagaagaattctcagtaacttccgcgtgtacagagcagacttgaaacactctttttgtggaatttgcaagtggagatttcagccgctttgaggtcaatggtagaaaaggaaatatcttcctataaaaactagacagaatgattctcagaaactcctttgtgatgtgtgcgttcaactcacagagttcaacctttcttttcatagagcagttgggaaacactctgtttgtaaagtctgcaagtggatattcagacttctttgaggcctccgttggaagagggatttcttcatattctgctagacagaagaattcccagtaacttccttgtgttgtgtgtgttcaactcacagagttgaactttcatttacccagagcagatttgaaaccctctttttgtggaatttgcaagtggagatttcaagcactttgaggccaaaggcagaaaaggaaatatcttcgtttcaaaactagacagaatcattctcagaaactgctctgcgatgtgtgcgttcaactctcagagtttaacttttcttttcattcagcagtttggaaacactctgtttgtaaagtctgcacgtggatattttgaccacttataggccttcgttggaaacgggtttttttcctgtaaggctagacagaagaattctcagtaacttccttgtgttgtgtacattcaactcacagagttgaacgttcccttagacagagcatatttgaaacactctttttgtgcaattggcaagtggagatttcaagcgctttaaggtcaatggcagaaaaggaaatatcttcgtttcaaaactagacagaatcattcccacaaactgcgttgtgatgtgttcgttcaactcacagagtttaacttttctgttcatagagcagttaggaaacactctgtttgtaaagtctgtaagtggatattctgacatcttgtggccttcgttggaaacgggatttcttcctattctgctagacagaagaactctcagtaacttccttgtgttgtgtgtattcaactcacagagttgaacgatcctttacacagagcagacttgaaacattcttttcgtggaatttgcaactggtgatttcagccgctttgaggtcaatggtagaataggaaatatcttcctatagaaactagacagaatgattctcagaaactcctttgtgatgtgtgcgttcaactcacagagtttaaccttttttttcatagagcagttaggaaacactctgtttgtaaagtctgcaagtggatattcagacgtctttgaggccttcgttggaaacgggatttcttcatactatgctagacagaagaattcccagtaacttccttgtgttgtgtgtgttcgactcacagagttgaactttcatttacacagagcagatttgaaacactctttttgtggaatttgcaagtggagatttcaagcgctttgaggccaaaggcagaaaaagaaatatcttcgtttcaaaactagacagaatcattctcagaaactgttctgcgatgtgtgcgttcaactctcagagtttaacttttcttttcattcagcagtttggaaacactctgtaaactctgcatgtggatattttgaccacttagaggccttcgttggaaacgggtttttttcctgtaaggctagacagaagaattcccagtaacttccttgtgttgtgtacattcaactcacagagttgaacgttcccttagacagagcagatttgaaacactctttttgtgcaattggcaagtggtgatttcagccgctttgaggtcaatggtagaaaaggacatatcttcgtataaaaactagacagaatcattcccacaaactgcgttgtgatgtgttcgttcaactcacagagtttaacctttcttttcatagagcagttaggaaacaagtctgtttgtcaattctgtaagtggatattctgacatcttgtggccttcgttggaaacgggatttcttcatattctgctagacagaagaattctcagaatcttccttgtgttgtgtgtattcaactcacacagttgaacgatggtttacacagagcagatttgaaacactctttttgtggagtttggaagtggagatttcagccgctttgaggtcaatggtagaaaaggaaatatcttcgtataaaaactagacagaatgattctcacaaactcctttgtgatgtgtgcgttcaactcacagagtttaagctttcttttcatagagcagttgggaaacactctgtaaagtctgcaagtggatattcagacctctttgaggctttcgttggaaacgggatttcttcatattctgctagacagaagaattctcagtaacttccttgtgttgtgtgtattcaactcacagagttgaccgatcctttacacagagtagacttgtaacactctttttgtggaatttgcaagtggagatttcagccgctttgaagtcaaaggtagaaaagggaatatcttcctataaaaactagacagaatcattctcataaactgctgcgtgatgtgtgcgttcaactctcagagtttaacttttcttttcattcagcggtttggaaacactctgtttgtaaagtctgcacgtggatattttgaccacttagacgccttcgttggaaacgggtttttttcatgtaaggctagacagaagaattcccagtaacttccttgtgttgtgtacattcaactcacagagttgaacgttcccttagacagagcagatttgaaacactctttttgtgcaattggcaagtggagatttcaagcgctttgaggtcaatggcagaaaaggaaatatcttcgtttcaaaactagacagaatcattgccacaaactgcgttgtgatgtgttcgttcaactcacagagtttaacctttcttttcatagagcagttaggaaacagtctgtttgtaaattctgtaagtggatattctgacagcttgtggccttcgttggaaacgggatttcttcatactatgctagacagaagaattctcagaatcttccttgtgttgtgtgtattcaactcaccgagttgaacgatcctttacacagagcagacttgaaacactctttttgtggaatttgcaagtggagatttcagccgctttgaggtccatgttagaaaaggaaatatcttcgtacaaaaactagacagaatgattctcagaaacttctttgtgatgtgtgccttcaactcacagagtttaacctttcttttcatagagcagttaggaaacactctgcttgtaaactctgcaagtggatattcagacctctttgaggccttcgttggaaacgggatttctccatactatgctagacagaagaattcccagtaacttccttgtgttgtgtgtgttcaactcacagagttgaactttcatttacacagagcagatttgaaacactctttttgtggaatttgcaaatggagatttcaagcgctttgaggccgaaggcagaaaaggaaatatcttcgtataaaaactagacagaatcattctcagaaactgctctgcgatgtgtgcgttcaactctctgagtttaacttttcttttcattcagcagtttggaaacactctgtttgtaaagtctgcacgtggataacttgaccacttagaggccttcattggaaacgggtttttttcatgtaaggctagacagaagaattcccagtaacttccttgtgttgtgtgcattcaactcacagagttgaacgttccttagacagagcagatttgaaacactctatttgtgcaatttgcaagtgtaggtttcaagcgctttaaggtcaatggcagaaaaggaaatatcttcgtttcaaaactagacagaatcattcccacaaactgcgttgtgatgtgttcgttcaactcacagactttaacctttcttttcatagagcagttaggaaacactctgtttgtaaagtctgtaagtggatattctgacatcttgtggccttcgttggaaacgggatttcttcatattctgctagacagaagaattctcagtaacttccttgtgttgtgtgtattcaactcacagagttgaacgatcctttacacagagcagacttgaaacactctttttgtggaatttgcaagtggagatttcagccgctttgaggtcaatgatagaaaaggaaatatcttcgtataaagactagacagaatgattctcagaaactcctttgtgatgtgtgcgttgaattcacaaaatttaacatttcttttcatagagcagttaggaaacaccctgtttgtaaagtctgcaagtggatattcagacctctttgaggccttcgttggaaacgggatttcttcatattctgctagacagaagaattcccagtaacttccttgtgttgtgtgtgttcaactcacagagttgaactttcatttacacagagcagatttgaaacactctttttgtggaatttgcaagtggagatttcaagcgctttggggccaaaggcagaaaaggaaatatcttcgtataaaaactagacagaatcattctcagaaactgctctgcgatgtgtgcgttcaactctcagagtttaacttttcttttcattcagcagtttggaaacactctgtttgttaagtctgcacgtggatattttgaccacttagaggccttcgttggaaacgggtttttttcctgtaaggcttgacagaagaattcccagtaacttccttgtgttgtgtacattcaactcacagagttgaacgttcccttagacagagcagatttgaaacactctttttgtgcaattggcaagtggtgatttcagccgctttgaggtcaatggtagaaaaggaaatatcttcgtataaaaactagacagaatgattctcagaaacttcattgtgatgtgtgcgttcaactcacagagtttaacctttcttttcatagagcagttaggaaacactctgtttgtgaactctgcaagtggatattcagacgtctttgaggccttcgttggaaatgggatttcttcatactgtgctagacagaagaattctcagtaacttccttgtgttgtgtgtattgaactcgcagagttgaacgatcctttacacagagcagacttgaaacactctttttgtggaatttgcaagtggagatttcagccgctttgaggtcaatagtagaaaatgaaatatcttcgtagaaaaactagacagaatgattctcataaactcctttgtgatgtgtgcgttcaactcacagagtttaacttttcttttcatagcagcagttaggaaacactctgtttgtaaagtctgcaagtggatattcagacctctttgaggccttcgttggaaacgggatttcttcatattctgctagacagaagaattctcagtaacttccttgtgttgtgtgtattcaactcacagacttgaacgatcctttacacagagcagacttgaaacactctttttgtggaatttgcaaatggagatttcagccgctttgaggtcaatagtagaaaaggaaatatcttcgtagaaaaactagacagaatgattctcagaaaatcttttgtgatctgtgcgttcaactcacagagtttaacttttcttctcatagagcagttaggaaacactctgtttgtaaagtctgcaagtggatattcagacctctttgaggccttcgttggaaacgggatttcttcatattctgctagacagaagaattcccagtaacttccttgtgttgtgtgcattcaactcacagagttgaacgttcacttagacagagcagatttgaaacactctatttgtgcaatttgcaagtgtagatttcaagcgctttaaggtcaacggcagaaaaggaaatatcttcgtttcaaaactagacagaatcattcccacaaactgcgttgtgatgtgttcgttcaactcacagagtttaacctttcttttcatagagcagttaggaaacagtctgtttgtcaattctgtaagtggatattctgacatcttgtgtccttagttggaaacgggatttcttcatattctgctagacagaagaattctcagtaacttccttgtgttttgtgtattcaactcacagagttgaacgatccttttcacagagcagacttgaaacactctttttgtggaatttgcaagtggagatttcagccgctttgaggtcaatagtagaaaaggaaatatcttcgtagaaaaactagacagaatgattctcagaaactcctttgtgatgtgtgcgttcaactcacagagtttaacctttcttttcatagagcagttaggaaacactctgtttgtaaagtctgcaagtggatattcagacctctttgaggccttcgttggaaacgggattttttcatataaggctagacagaagaattctcagtaacttccttgtgttgtgtgtattcaactgacagagttgaactttcatttagagagagcagatttgtaagactgtttttgtggaatttgcaagtggagatttcaagcgctttgcggccaaaggcagaaatggaaatatcttcgtataaaaactagacagaatcattctcagaaaatcctctatgatgtgtgcgttcaactctcagagtttaacttttcttttcattcagcagtttgaaaacactctgtttgtaaagtctgcacgtggatattttgaccacttagaggccttcgttggaaacgggtttttttcatgtaagggtagacagaagaattcccagtaacttccttgtgttgtgtgcattcaactcacagagttgaaagttcccttagacagagcagatttgaaacactctatttgtgcaatttgcaagtgtagacttcaagcgctttaaggtcaacggcagaaaaggaaatatcttcgtttcaaaactagacagaatgattctcagaaactcctttgtgatgtgtgcgttcaactcacagagtttaacctttcttttcatagagcagttaggaaacactctgtttgtaaagtctgcaagtggatattcagacctctttgaggccttcgttggaaacgggttttcttcatattctgctagacagaagaattctcagtaacttccttgtgttgtgtgtattcaactcacagagttgaacgatcctttacacagagcagtcttgaaacactctttttgtggaatttgcaagtggagatttcagccgctttgaggtcaatagaagaaaaggaaatatcttcgtagaaaaactaggcagaatgattctcagaaactcctttgtgatgtgtgcgttcaactcacagagtttaacctttcttttcatagagcagttaggaaacactctgtttgtaaagtctgcaagtggatattcagacatccttgaggctttcgttggaaacgggatttcttcatattctgctagaaaaaagaattctcagtaacttccttgtgttgtgtgtattcaactcatagagttgaacgatcctttacacagagcagacttgtaacactctttttgtggaatttgcaagtggagatttcaagcgctttgaggccaaaggcagaaaaggaaatatcttcgtttcaaaactagacagaatcattctcagaaactgctctgcgatgtgtgcgttcaactctcagagtttaacttttctttagcattcagcagtttggaaacactctgtttgtaaagtctgcacgtggatattttgaccacttagaggccttcgttggaaacgggtttttttcctgtaaggctagacagaagaattcccagtaacttccttgtgttgtgtgcattcaactcacagagttgaacgttcccttggacagagcagatttgaaacactctatttgtgcaatttgcaagtgtagatttcaagcgctttaaggtcaacggcagaaaaggaaatatcttcgtttcaaaactagacagaatcattcccacaaactcgcgttgtgatgtgttcgttcaactcacagagtttaacctttctgttcatagagcagttaggaaacactcagtttgtaaagtctgtaagtggatattctgacatcttgtggccttcgttggaaacgggatttcttcatattctgctagacagaagaattctcagaatcttccttgtgttgtgtgtattcaactcacacagttgaacgatggtttacacagagcagatttgaaacactctttttgtggaatttgcaagtggagatttcagccgctttgaggtcaatggtagaaaatgaaatatcttcgtataaaaactagacagaatgattctcataactcctttgtgatgtgtgcgttcaactcacagagttcaacctttcttttcatagagcagttgggaaacactctgtttgtaaagtctgcaagtggatattcagacttctttgaggccttcgttggaagcgggatttcttcatattctgctagacagaagaattctcagtaactgccttgtgttgtgtgtattcaactcacagagttgaacgatcctttacacagagaagacttgaaacactctttttgtggaatttgcaagtggagatttcagccgctgtgaggtcaatggtagaataggaaatatcttcctatagaaactagacagaatcattctcagaaactgctgcgtgatgtgtgcgttcaactctcagagtttaacttttcttttcattcagcggtttggaaacactctgtttgtaaagtctgcacgtggatattttgaccacttagaggccttcgttggaaacgggtttttttcatgtaaggctagacagaagaattcccagtaactttccttgtgttgtgtgcattcaactcacagagctgaacgttcccttagacagagcagatttgaaacactctatttgtgcaatttgcaagtgtagatttcaagcgctttaaggtcaatggcagaaaaggaaatatcttcgtttcaaaactagacagaatcattcccagaaactgcgttgtgatgtgttcgttcaactcacagagtttaacctttctgttcatagagcagttaggaaacactctgtttgtaaagtctgtaagtggatattctgacatcttgtggccttcgttggaaacgggatttcataatattctcctagacagaagaattctcagaatcttccttgtgttgtgtgtattcaactcacagagttgaacgatggtttacacagagcagatttgaaacactcttttggtggaatttgcaagtggagatttcagccgctttgaggtcaatggtagaaaaggaaatatcttcgtataaaaactagacagaatgattctcagaaactcctttgtgatgtgtgcgttcaactcacaaagtttaacctttcttttcatagagcagttaggaaacactctgtttgtaaagtctgcaagtggatattcagacctctttgaggccttcgttggaaacgggatttcttcatattctgctagacagaagaattctcagtaacttccttgtgttgtgtgtattcaactgacagagttgaactttcatttagagagagcagatttgaaacactgtttttgtggaatttgcaagtggagatttcaagcgctttggggccaaaggcagaaaaggaaatatcttcgtataaaaactagacggaatcattctcagaaactgctgcgtgatgtgtgcgttcaactctcagagtttaacttttcttttaattcagcggtttggaaacactctgtttgtaaagtctgcacgtggatattttgaccacttagaggccttcgttggaaactggttttttgcatgtaaggctagacagaataattcccagtaacttccttgtgttgtgtgcattcaactcacagagttgaacgttcccttagacagagcagatttgaaacactctatttgtgcaatttgcaagtgtagatttcaagcgctttaaggtcaatggcagaaaaggaaatatcttcgtttcaaaagtagacagaatgattctgagaaactcctttgtgatgtgtgcgttcaacacacagagtttaacctttcttttcatagagcagttaggaaacactctgtttgtaaagtctgcaagtggatattcagacctccttgaggccttcgttggaaacgggatttcttcatattctgctagacagaagaattctcagtaacttccttgtgttttgtgtattcaactcacagagttgaatgatcctttacacagaacagacttgaaacactcttgttgtggaattttcaagtggagatttcagccgctttgaggtcaacggtagaataggaaatatcttcctatagaaactagacagaatgattctcagaaactcctttgtgatgtgtgcgttcaactcacagagtttaacttttcttttcatagagcagttaggaaacactctgtttgtaaagtctgcaagtggatattcagacctctttgtggccttcgttggaaacgggatttcttcatattatgctagacagaataattctcagtaacttccttgtgttgtgtgtattcaactctcagagttgaacgatcctttacagagagcagacttgaaacactctttttctggaatttgcaagtggagatttcagccgctttgaggtcaatggtagaataggaaatatcttcctatagaaactagacagaatcattctcagaaactgctctgcgatgtgtgcgttcatctctcagagtttaacttttcttttcattcagcagtttggaaacactctgtttgtaaagtctgcacgtggatattttgaccacttagaggccttcgttggaaacgggtttttttcctgtaaggctagacagaagaattcccagtaacttcccttgtgttgtgtacattcaactcacagagttgaacgttcccttagacagagcagagttgaaacactctttttgtgcaattggcaagtggagatttcaagcgctttaaggtcaatggcagaaaaggaaatatcttcgtttcaaaactagagagaatcattcccacaaactgtgttgtgatgtgttcgttcaactcacagagtttaacctttcttttcatagagcagttaggaaacagtctgtttgtaaattctgtaagtggatattctgacatcttgtggccttcgttggaaacgggatttcttcatattctgctagacagaagaattctcagtaactgccttgtgttgtgtgtattcaactcacagagttgaacgatcctttacacagagcagacttgaaacactccttttgtggaatttgcaagtggagatttcagccgctttgaggtcaatggtagaataggaaatatcttcctatagaaactagacagaatgattctcagaaacttctttgtgcgttcaactcacagagtttaacctttcttttcatagagcagttaggaaacactctgtttgtaaagtctgcaagtggatattcagacctgtttgaggccttcgttggaaacgggatttcttcatactatgctagacagaagaattcccagtaacttccttgtgttgtgtgtgttcaactcacagagttgaactttcatttaaacagagcagatttgaaacactctttttgtggaatttgcaagtggagatttcaagcgctttgaggccaaaggcagaaaaggaaatatcttcgtaaaaaaatagacagaatcattctcagaaactgctctgcgatgtgtgcgttcaactctcagagtttaacttttcttttcattcagcagtttgaaaaccctctgtttgtaaagtctgcacgttgataatttgaccacatagaggccttcgttggaaacgggtttttctcatgtaaggctagacagaagaattcccagtaacttccttgtgttgtgtgcattcaactcacagagttgaacgttccctttgacagagcagatttgaaacactgtatttgtgcaatttgcaagtgtagatttcaagcgctttaaggtcaatggcagaaaaggaaatttcttcgtttcaaaactagacagaatcattcccacaaactgcgttgtgatgtgttcgttcaactcacagagtttaacctttctgttcatagagcagttaggaaacactctgtttgtaaagtctgtaagtggatattctgacatcttgtggccttcgttggaaacgggatttcttcgtattctgctagacagaagaattctcagtaacttccttgtgttgtgtgtattcaactcacagagttgaacgatcctttacacagagcagacttgaaacactctttttgtggaatttgcaagtgtagatttcagccgctttgaggtcaatggtagaataggaaatatcttcctatagaaactagacagaatgattctcataaactcctttgtgatgtgtgcgttcaaatcacagagtttaacttttcttttcatagagcagttaggaaacactctgtttgtaaagtctgcaagtggatattcagacctctttgaggccttcgttggaaacgggatttcttcatattatgctagacagaagaattcccagtaacttccttgtgttgtgtgtgttcaactcacagagttgaactttcatttacacagagcagatttcaaacactctttttgtggaatttgcaagtggagatttcaagcgctttgaggccaaaggcagaaaaggaaatatcttcgtataaaaactagacagaatcattctcagaaactgctctgcgatgtgtgcattcaactctcagagtttaacttttcttttcattcagcagtttggaaacactctgtttgtaaagtctgcacgtggatattttgaccacttagaggccttcgttggaaacgggtttttttcctgtaaggctagacagaagaattcccagtaacttccttgtgttgtgtatattcaactcacagagttgaacgttcccttagacagagcagatttgaaacactctttttgtgcaattggcaagtggacatttcaagcgctttgaggtcaatggcagaaaaggaaatatcttcgtttcaaaactagacagaatcattcccacaaactgcgttgtgatgtgttcgttcaactcacagagtttaacctttctgttcatagagcagttaggaaacactctgtttgtaaagtctgtaagtggatattctgacatcttgtggcctacgttggaaacgggatttctccatattctgctagacagaagaattctcagtaacttccttgtgttgtgtgtattcaactcacagaagttgagcgatcctttacacagagcagacttgaaacactctttttgtggaatttgcaagtggagatttcagccgctttgaggtcaatggtagaataggaaatatcttcgtatagaaactagacagaatgattctcagaaaatcctttgtgatgtgtgcgttcaactcacagagtttaacttttcttttcatatagcagttaggaaacactttgtttgtaaagtctgcaagtggatattcagacctctttgaggcattcgttggaaacgggatttctccatattatgctagagtgaagaattctcagtaacttccttgtgttgtgtgtattcaactgacagagttgaactttcatttagagagagcagatttgaaacactgtttttgtggaatttgcaattggagatttcaagcgctttggggccaaaggcagaaaaggaaatatcttcgtataaaaactagacggaatcattctcagaaactgctctgcgatgtgtgcgttcaactctcagagtttaacttttcttttcattcagcagtttggaaacactctgtttgtaaagtctgcacgtggatattttgaccacttagaggccttcgttggaaacgggtttttttcccgtaaggctagacagaagaattctcagtaacttccttgtgttgtgtgtattcaactcacagagttgaacgttcccttagacagagcagatttgaaacactctatttgtgcaatttgcaagtgtagttttcaagctctttaaggtcaacggcagaaaaggaaatatcttcgtttcaaaactagacagaatcattcccacaaactgcgttgtgatgtgttcgttcaactcacagagtttaacctttctgttcatagagcagttaggaaacactctgtttgaaaagtctgcacgtggatattcagacctctttgaggccttcgttggaaacgggatttcttcctattctgctagacagaagaattctcagtaacttcccttgtgttgtgtgtattcaactcacagagttgaacgatcctttacacagagcagacttgaaacactccttttgtggaatttgcaagtggagatttcagccgctttgaggtcaatggtagaataggaaatatcttcctatagaaactagacagaatgattctcagaaactcctttgtgatgtgtgcgttcaactcacagagttcaacctttcttttcatagagcagttaggaaacactctgtttgtaaagtctgcaagtggatattcagacttctttgaggctttcgttggaaacgggatttcttcatattctgctagacagaagaattctcagtaacttccttgtgttgtgtgtattcaactgacagagttgaactttcatttagagagagcagatttgaaacactgttcttgtggaatttgcaagtggagatttcaagcgctttggggccaaaggcagaaaaggaaatatcttcgtataaaaactagacagaatcattctccgaaactgctctgcgatgtgtgcgttcaactctcagagtttaacttttcttttcattcagcagtttggaaacactctgtttgtaaagtctgcacgtggataacttgaccacttagaggccttcgttggaaacgggtttttttcctgtaaggctagacagaagaattcccagtaacttccttgtgttgtgtacattcaactcacagagttgaacgttcccttagacagagcagatttgaaacactctttttgtgcaattggcaaatggagatttcaagcgctttaagttcaatggcagaaaaggaaatatcttcgtttcaaaactagacagaatgattctcagaaactccgttgtgatgtgtgcgttcaactcacagagtttaacctttcttttcatagagcagttaggaaacactctgtttgtaaagtctgcaagtggatattcagacctctttgaggccttcgttggaaacgggatttcttcatattctgctacagagaagaattctcagtaacttccttgtgttgtgtgtattcaactcacagagttcaacgatcctttacacagagcagacttgaaacactgtttttgtggaatttgcaagtggagatttcagccgctttgaggtcaatggtagaaaaggaaatatcttcctataaaaactagaccgaatgattctcagaaactcctttgtgatgtgtgtgtgttcaactcacagagtttaacatttcttttcatagagcagttaggaaacactctgtttctaaagtctgcaagtggatattcagacctctttgaggccttcgttggaaacgggtttttttcatataaggctagacagaagaattcccagtaactttccttgtgttgtgtgtgttcaactcacagagttgaactttcatttacacagagcagatttgaaacactctttttgtggaatttgcaaatggagatttcaagcgctttgaggccaaaggcagaaaaggaagtatcttcgtataaaaactagacagaatcattctcagaaactgctctgcgatgtgtgcgttcaactctcagagtttaacttttcttttcattcagcagtttggaaacactctgtttgtaaagtctgcacgtggataacttgaccacttagaggccttcgttggaaacgggtttttttcatgtaaggctagacagaagtattctcagtaacttccttgtgttgtgtgtattcaactcacagagttgaacgatcctttacacagagcagacttgtaacactctttttgtggaatttgcaagtggagatttcagccgctttgaagtcaaaggtagaaaaggaaataacttcctataaaaactagacagagtgattctcagaaactcctttgtgatgtctgcgttcaactcacagagtttaacctttcttttcatagagcagttaggacacactctgtttgtaaagtctgcaagtggatattcagacatctttgaggccttcgttggaaacgggatttcttcatgttctgctagacagaattctcagtaacttccttgtgttgtgtgtattcaactcacagagttgaacgatcctttacacagagcatacttggaacactctttttgtggaatttgcaagtggagatttcagccgctttgaagtcaaaggtagaaaaggaaatatcttcctataaaaactagacagaatgattctcagaaactcctttgtgatgtgtgcattcaactcacagagtttaacctttcttttcatagagcagttaggaaacactctgtttgtaaagtctgcaagtggatattcagacctctttgaggccttcgttggaaacgggtttttttcatataaggctagacagaagaattctcagtaacttccttctgttgtgtgtattcaactgacagagttgaactttcatttagagagagcagatttgaaacactgtttttgtggaatttgcaagtggagatttcaagcgctttggggccaaaggcagaaaaggaaatatcttcgtataaaaactagacagaatcattctcagaaactgctgcgtgatgtgtgcgtccaactctcagagtttaacttttcttttcattcagcggtttggaaacactctgtttgtaaagtctgcacgtggatattttgaccacttagaggtcttcattggaaacgggtttttttcatgtaaggctagacagaagaattcccagtaacttccttgtgttgtgtacattcaactcacagagttgaacgttcccttagacagagcagatttgaaacactctttttgtgcaattggcaagtggtgatttcagcctctttgaggtcaatggtagaaaaggaaatatcttcgtataaaaactagacagaatcattcccacaaactacgttgtgatgtgttcgttcaactcacagagtttaacctttctgttcatagagcagttaggaaacactctgtttgtaaagtctgtaagtggatattctgacatcttgtggccttcgttggaaacgggatttcttcatattctgctagacagaagaattctcagaatcttccttgtgttgtgtgtattcaactcacagagttgaacgatcctttacacagagcagacttgaaacactctttttgtggaatttgcaagtggagatttcagccgctttgaggtccatgggagaaaaggaaatatcttcgtataaaaactagacagaatgattctcagaaactcctttgtgatgtgtgcgttcaactcacagagtttaacctttcttttcatagagcagttaggaaacactctgtttgtaaagtctgcaagtggatattcagacctctttgaggccttcgttggaaacgggtttttttcatactatgctagacagaagaattcccagtaacttccttgtgttgtgtgtgttcaactcacagagttgaactttcatttacacagagcagatttgaaacactctttttttggaatttgcaagtggagatttcaagcgatttgaggccaaaggcagaaaaggaaatatcttcgtttcaaaactagacagaatcattctcagaactgctctgcgatgtgtgcgttcaactctcagagtttaacttttcttttcattcagcagtttggaaacactctgtttgtaaagtctgcacgtggatattttgaccatttagaggctttcgttggaaacgggtttttttcttgtaaggctagacagaagaattcccagtaacttccttgtgttgtgtgcattcaactcacagagttgaacgttcccttagacagagcagatttgaaacactctatttgtgcaatttgcaagtgtagatttcaagcgctttaaggtcaacggcagaaaaggaaatatcttcgtttcaaaactagacagaatcattcccacaaactgcgttgtgatggttcgttcaactcacagagtttaacctttcttttcatagagcagttaggaaacagtctgtttgtcaattctgtaagtggatattctgacatcttgtggccttcgttggaaacgggatttcttcatattctcctagacagaagagttctcagaaacttccttgtgttgtgtgtattcaactcacagagttgaacgatcctttacgcagagcagacttgaaacactctttttgtggaatttgcaagtggagatttcagccgctttgaggtcaatggtagaataggaaatatcttcctatagaaactagacagaatgattctcagaaactcctttgtgatgtgtgcgttcaactcacagagtataacctttcttttcatagagcagttaggaaacactctgtttgtaaagtgtgcaagtggatattcagacctctttgaggccttcgttggaaacggcatttcttcataatatgctagacagaagaattctcagtaacttccttgtgttgtgtgtattcaactcacagagttgaacgatcctttacacagagcagacttgaaacactctttttgtggaatttgcaagtgtagatttcagccgctttgagttcaatggtagaataggaaatatcttcctatagaaactagagagaatcattctccgaagctgctgcgtgatgtgtgcgttcaactctcagagtttaacttttcttttcattcagcggtttggaaacactctgtttgtgaagtctgcacgtggatattttgaccacttagaggccttcgttggaaacgggtttttttcatgtaaggctagacagaagatttcccagtaacttccttgtgttgtgtgcattcaactcacagagttgaacgttcccttagacagagcagatttgaaacactctatttgtgcaatttgcaagtgtagatttcaagcgctttaaggtcaatggcagaaaaggaaatatcttcgtcttcaaaactagacagaatgattctgtgaaactcctttgtgatgtgtgcgttcaactcacacagtttaacctttcttttcatagagcagttaggaaacactctgtttgtaaagtctgcaagtggatattcagacctccttgaggccttcgttggaaacgggatttcttcatattatgctagaaagaagaattcccagtaacttccttgtgttgtgtgtatacaactcacagagttgaacgatcctttacacagagcagacttgaaacactctttttgtggaatttgcaagtggagatttcagccgctttgagttcaatggtagaataggaaatatcttcctatagaaactagacagaaatgattctcaggaaactcctttgtgatgtgtgcgttcaactcacagagtttaacctttcttttcatagagcagttaggaaacactctgtttgtaaagtctgcaagtggatattcagacctctttgaggccttcgttggaaacgggtttttttcatataaggctagacagaagaattccctgtaacttccttgtgttgtgtgtgttcaactcacagagttgaactttcatttacacagagcagatttgaaactctccttttgtggaatttgcaagtggagatttcaagcgctttgaggccaaaggcagaaaaggaaatatcttcgtttcaaaactagacagaatcattctcagaaactgctctgcgatgtgtgcgttcaactctcagagtttaacttttcttttcattcagcagtttggaaacactctgtttgtaaagtctgcacgtggatattttgaccatttagaggccttcgttggaaacgggtttttttcttgtaaggctagacagaagaattcccagtaacttccatgtgttgtgtgcattcaactcacagagttgaacgttcccttgaacagagcagatttgaaactctctatttgtgcaatttgcaagtgtagatttcaagcgctttaaggtcaatggcagaaaaggaaatatcttcgtttcaaaactagacagaatgattctgagaaactcctttgtgatgtgtgcgttcaactcacagagtttaacctttcttttcatagagcagttaggaaacactctgtttgtaaagtctgcaagtggatattcagacatctttgaggctttctttggaaacgggatttcttcatattctgctagacagaagaattctcagaaacttcgttgtgttgtgtgttttcaactcacagagttcaacgatcctttacacagagtagacttgaaacactctttttgtggaattggcagggtggagatttcagccgctttgaggtcaatggtagaaaagtaaatatcttcgtataaaaactagacagaatgattgtcagaaactcctttgtgatgtgtgtgttcaactcacagagtttaacctttcttttcatagagcagttagtaaacactctgtttataaagtctgcaagtggatattcagacccctttgaggccttcgttggaaacgggatttcttcatattatgctagacagaagaattcccagtaacttccttgtgttgtgtgtgttcaactcacagagttgaactttcatttacccagagcagatttgaaacactgtttttgtggaatttgcaagtggagatttcaagcgctttgaggccaaaggcagaaaaggaaatatcttcgtttcaaaactagacagaatcattctttgaaactgctgcgtgatgtgtgcgttcaactctcagagtttaacttttcttttcattcagcggtttggaaacactctgtttgtaaagtctgcacgtggaaattttgaccacttagaggccttcgttggaaacgggtttttttcatgtaaggctagacagaagaattcccagtaacttccttgtgttgtgtgcattcaactcacagagttgaacgttcccttagacagagcagatttgaaacactctatttgtgcaatttgcaagtgtagttttcaagctctttaaggtcaacggcagaaaaggaaatatcttcgtttcaaaactagacagaatcattcccacaaactgcgttgtgatgtgttcgttcaactcacagagtttaacctttctgttcatagagcagttaggaaacactctgtttgtaaagtctgcaagtggatattcagacctctttgaggccttcgttggaaacgggatttcttcatattatgctacacagaagaattctcagtaacttccttgtgttgtttgtattcaactcacagagttgaacgatcctttacacagagcagacttgaaacactctttttgtggaatttgcaagtggagatttcagccgctttgaggtcaatggtagaaaaggaaactatcttcatataaagactagacagaatgattctgagaaatcctttgtgatgtgtgcgtacaactcacagagtttaacctttcttttcatagagcagttaggaaacactctgtttgtaaagtctgcaagtggatattcagacctccttgaggccttcgttggaaacgggatttcttcatattatgctagacagaagaattcccagtaacttccttgtgttgtgtgtgttcaactcacagagttgaactttcatttacacagagcagatttgaaacactctttttgtggaatttgcaaatggagatttcaagcgctttgaggccaaaggcagaaaaggaaatatcttcatataaaaactagacagaatcattctcagaaactgctctgtgatgtgtacgttcaactctcagagtttaacttttcttttcattcagcagtttggaaacactctgttcgtaaagtctgcacgtggataatttgaccacttagaggccttcgttggaaacgggtttttttcatgtaaggctagacagaagaattcccagtaacttccttgtgttgtgtgctttcaactcacagagttgaacgttcccttagacagagcagatttgaaacactctatttgtgcaatttgcaagtgtagatttcaagcgctttaaggtcaatggcagaaaaggaaatatcttcgtttcaaaactagacagaatcattcccacaaactgcgttgtgatgtgttcgttcaactcacagagttttacctttctgttcatagagcagttaggaaacactctgtttgtaaagtctgcaagtggatattcagacctccttgaggccttcgttggaaacgggatttcttcatattctgctagacagaagaattctgagtaacttccttgtgttgtgtgtattcaactcacagagttgaacgatcctttacagagagcagactttaaacactctttttgtggaatttgcaagtggagatttcagccgctttgaggtcaatggtagaaaaggaaatatcttcgtataaagactagacagaatgattctcagaaactcctttgtgatgtgtgcgttcaactcacagagtttaacttttcttttcatagagcagttaggaaacactctgtttgtaaagtctgcaagtggatattcagacctctttgaggccttcgttggaaacggcatttcttcatattatgctagacagaagaattctcagtaacttcctcgtgttgtgtgtattcaactgacagagttgaactttcatttagagagagcagatttgaaacactctttttgtggaatttgcaagtggagatttcaagcgctttggggccaaaggcagaaaaggaaatatcttcgtataaaaactagacagaatcattctcagaaactgctgtgtgatgtgtgcgttcaactctcagagtttaacttttcttttcattcagcggtttggaaacactctgtttgtaaagtctgcacgtggatattttgaccacttagaggccttcgttggaaacgggtttttttcatgtaaggctagacagaagaattcccagtaacttccttgtgttgtgtacattcaactcacagagttgaacgttcccttagacagagcagatttgaaacactctttttgtgcaattggcaaatggagatttcaagcgctttaaggtcaatggcaggaaaggaaatatcttcgtttcaaaactagacagaatcattcccacaaactgcgttgtgatgtgttcgttcatctcacagagtttaacctttcttttcatagagcagttaggaaacactctgtttgtaaattctgtaagtggatattctgacatcttgtggccttcgttggaaacgggatttcttcatattctgctagacagaagaattctcagcaacttccttgtgttgtgtgtattcaactcacaaagttgaacgatcctttgagcagacttgaaacactctttttgtggaatttgcaagtggagatttcagccgctttgaggtcaatggtagaaaaggaaatatcttcgaataaaaactagacagaatgattctaagaaactcctttgagatgtgtgcgttcaactcacagagtttaacctttcttttcatagagcagttaggaaacactctgtttgtaaagtctgcaagtggatattcagacctctttgaggccttcgttggaaacgggatttcttcatattctgctagaaagaagaattctcattaacttcattgtgttgtgtgtattcaactcacagagttcaacgatcctttacacagagcagacttgaaacactctttttctggaatttgcaagtggagatttcagccgctttgaggtcaatggtagaaaaagaaatatcttcctataaaaactagacagaatcattctcagaaactgctctgcgaggtgtgcgttcaactctcagagtttaacttttcttttcattcagcagtttggaaacactctgtttgtaaagtctgcacgtggatattttgaccacttagaggccttcgttggaaacgggtttttttcctgtaaggctagacagaagaattcccagtaacttccttgtgttgtgtacattcaactcacagagttgaacgttcccttagacagagcagatttgaaacactctttttgtgcaattggcaagtggagatttcaagcgctttaaggtcaatggcagaaaaggaaatatcttcgtttcaaaactagacagaatcattcccacaaactgcgttgtgatgtgttcgttcaactcacagagtttaacctttctgttcatagagcagttaggaaacactctgtttgtaaagtctgtaagtggatattctgacatcttgtgcccttcgttggaaacgggatttcttcctattctggtagacagaagaattctcagtaacttccttgtgttgtgtgcattcaactcacagagttgaacgatcctgtacacagagcagacttgaaacactctttttgtggaatttgcaagtggagatttcagccgctttgaggtcaatggtagaaaagggaatatcttcgtatagaaactagacagaatgattctcagaaacttcttggtgatgtgtgcgttcaactcacagagtttaacctttcttttcatagagcagttaggaaacactctgtttgtaaactctgcaagtggatattcagacctgtttgaggccttcgttggaaacgggatttcttcatactatgctagacagaaaaattcccagtaacttccttgtgttgtgtgtgttcaactcacagagttgaactttcatttacacagagcagatttgaaacactctttttgtggaatttgcaagtggagatttcaagcgctttgaggccaaaggcagaaaaggaaatatcttcgtttcaaaactagacagaatcattctcagaaactgctctgcgatgtgtgcgttcaactctcagagtttaacttttcttttcattcagcagtttggaaacactctgtttgtaaagtctgcacgtggatattttgaccacttagaggccttcgttgcaaacgggtttttttcctgtaaggctagacagaagaattcccagtaacttccttgtgttgtgtgcattcaactcacagagttgaacgttcccttagacagagcagatttgaaacactctatttgtgcaatttgaaagtgtagatttcaagcgctttaaggtcaacggcagaaaaggaaatatcttcgtttcaaaactagacagaatcattcccacaaactgcgttgtgatgtgttcgtttaactcacggagtttaacctttctgttcatagagcagttaggaaacactctgtttgtaaattctgcaagtggatattcagacctctttgaggccttcgttggaaacgggatttcttcatattatgctagacagaagaattctcagtaacttccttgtgttgtgtgtattcaactcacagagttgaatgatcctttacacagaacagtcttgaaacactctttttgtggaatttgcaagtggagatttcagccgctttgaggtctatggtagaataggaaatatcttcctatagaaactagacagaatgattctcagaaactcctttgtgatgtgtgcgttcaactcacagagtttaacctttcttttcatagagcagttaggaaacactctgtttgtaaagtctacaagtggatattcagacatctttgaggctttcgttggaaacgggatttcttcatattctgctagacagaagaattctcagtaacttcttgtgttgtgtgtattcaactgacagagttgaactttcatttagacagatcagatttgaaacactgttttcgtggaatttgcaagtggaggtttcaagcgctttgaagccaaaggcagaaaaggaaatatcttcctataaaaaccagacagaaacattctcaaaaactgctctgtgatgtgtgcgttcaactctcagagtttaattttcttttcattcagcagtttgtaaacactctgtttgtaaagtctgcacgtggatattttgaccacttagaggccttcgttggaaacgagtttttttcatgtaaggctagacagaagaattcccagtaacttccttgtgttgtgttcattcaactcacagagttgaacgttcccttagacagagtagatttgaaacactctttttgtgcaattggcaagtggagatttcaagcgctttaaggtcaatggcagaaaaggaaatatcttcgtttcaaaactagacagaatgattctcagaaacttcattgtgacgtgtgcgttcaactcacagagtttaacctttcttttcatagagcagttaggaaacagtctgtttgtcaattctgtaagtggatattctgacatcttctggccttcgttggaaacgggatttcttcatattctgctagacagaagaattctcagaaacttccttgtgttgtgtgttttcaactcacagagttgaacgatcctttacacagagcagacttgaaacactccttttgtggaatttgcaagtggagatttcagccgctttgaggtcaatggtagaataggaaatatcttcctataaaaactagacagaatgattctcagaaacttcattgtgatgtgtgcgttcaactcacagactttaacctttcttttcatagagcagttaggaaacactctgtttgtaaagtctgcaagtggatattcagacctctttgaggccttcgttggaaactggtttttttcatgtaaggctagacagaagaattcccagtaacttccttgtgttgtgtgtgttcaactcacagagttgaactttcatttacacagagcagatttgaaacactctttttgtggaatttgcaaatggagatttcaagcgctttgaggccaaaggcagaaaaggaaacatcttcgtataaaaactacacagaatcattctcagaaactgctctgcgatgtgtgcgttcaactctcagagtttaactttgcttttcattcagcagtttggaaacactctgtttgtaaagtctgcacgtggataatttgaccacttagaggccttcgttggaaacgggtttttttcatgtaaggctagacagaagaattcccagtaacttcattgtgttgtgtgcattcaactcacagagttgaacgttcccttagacagagcagatttgaaacactctatttgtgcaatttgcaagtgtagatttcaagcgctttatggtcaacggcagaaaaggaaatatcttcgtttcaaaactagacagaatcattcccacaaactgcgtagtgatgtgttcgttcaactcacagagtttaacctttctgttcatagagcagttaggaaacactctgtttgtaaagtctgtaagtggatattctgacatcttgtggccttcgttggaaacgggatttcttcatattctgctagacagaagaattctcagaaacttccttgtgttgtgtgtattcaactcacagagttgaacgatcctttacagagagcagacttgaaacactctttttgtggaatttgcaagtggagatttcagccgctttgaggtcaaaggtagaataggaaatatcttcctacagaaactagacagaatgattctcagaaactcctttgtgatgtgtgcgttcaactcacagagtttaccctttcttttcatagagcagttaggaaacactctgtttgtaaagtctgcaagtggatattcagacgtccttgaggctttcgttggaaacgggatttcttcatattctgctagaaagaagaattcccagtaacttccttgtgatgtgtgtgttcaactcacagagttgaactttcatttacacagagcagatttgaaacactctttttgtggaatttgcaagtggagatttcaagcgctttgaggccaaaggcagaaaaggaaatatcttcgtataaaaactacacagaaatcattctcagtaaactgctgcgtgatgtgtgcgttcaactctcagagtttaacttttcttttcattcagcagtttggaaacactctgtttgtaaagtctgcacgtggaaattttgaccacttagaggccttcgttggaaacgggtttttttcatgtaaggctagacagaagaattcccagtaacttccttgtgttgtgtacattcaactcacagagttgaacgttcccttagacagagcagatttgaaacactctttttgtgcaattggcaagtggtgatttcagccgctttgaggtcaatggtataaaaggaaatatcttcgtattaaaactagacagaatcattctcagaaactgctctgcgatgtgtgcgttcaactctcacagtttaacttttcttttcattcagcagtttggaaacactctgtttgtaaagtctgcacgtggataatttgaccacttagaggccttcgttggaaacgggtttttttcatgtaaggctggacagaagaattctcagtaacttccttttgttgtgtgtattcaactcacagagttgaacgatcctttacacagagcagacttgtaacactctttttgtggaatttgcaagtggagatttcagccgctttgaagtcaaaggtagaaaaggaaatatcttcctataaaaactagacagaatgattctcagaaacttctttgtgatgtgtacgttcaactcacagagtttaacctttcttttcatagagcagttaggaaacactctgtttgtaaactctgcaagtggatattcagacctctttgaggccttcgttggaaacgggatttcttcatactatgctagacagaagaattctcagtaacttccttgtgttgtgtgtattcaactcacagagttgaacgatcctttacacagagcagtcttgaaacactctttttgtggaatttgcaagtggagatttcagccgctttgaggtcaatagtagaaaaggaaatatcgtcgtagaaaaactagacagaaatcattctcagaaactgctctgcgatgtgtgcgttcaactctcagcgtttaacttttcttttcattcagaagtttggaaacactctgtttgtaaagtctgcacgtggataacttgaccacttagaggccttcgttggaaacgggtttttttcatgtaaggctagacagaagaattcccaggaacttccttgtgttgtgtacattcaactcacagagttcaacgttcccttagacagagcagatttgaaacactctttttgtgcaattggcaagtggtgatttcagcctctttgaggtcaatggtagaaaaggaaatatcttcgtataaaaactagacagaatgattctcagaaacttctttgtgaagtgtgcgttcaactcacagtgtttaacctttcttttcatagagcagttaggaaacactctgtttgtaaactctgcaagtggatattcagacctctttgaggccttcgttggaaacgggatttcttcatactgtgctagacagaagaattctcagtagcttcattgtgttgtgtgtattcaactcacagatttcaacgatcctttacacagagcagacttgaaaccctctttttctggaatttgcaagtgtagatttcagccgctttgaggtcaatggtagaataggaaatatcttcctatagaaactagacagaatgattctcagaaactcctttgagatgtgtgtgttcaactcacagagtttaacctttcttttcatagagcagttaggaatcactctgtttgtaaagtctgcaagtggatattcagacctctttgaggccttcgttggaaacgggttttttcatataaggctagacagaagaattctcagtaacttccttgtgttgtgtgtattcaactcacagagttgaacgatcctttacacagagcagatttgtaacactctttttgtggaatttgcaagtggagatttcaagcgctttgaggccaaaggcagaaaaggaaatatcttcgtttcaaaactagacagaatcattctcagaaactgctctgtgatgtgtgcgttcaactctcagagtttaacttttcttttcattcagcagtttggaaacactctgtttgtaaagtctgcacgtggataatttgaccacttagaggcattcgttggaaacgggtttttttcatgtaacgctagacagaagaattcccagtaacttccttgtgttttgtgcattcaactcacagagttgaacgttcccttagacagagcagatttgaaacactctatttgtgcaatttgcaagtgtagatttcaagcgctttaaggtcaatggcagaaaaggaaatatcttcgtttcaaaactagacagaatgattctcagaaactcctttgtgatgtgtgcgttcaactcacagagtttaacctttcttttaatagagcaattaggaaacactctgtttctaaagtctgcaagtggatattcagacctcttagcggccttcgttggaaacgagatttcttcatattttgctagacaaaagaattctcagtaacttccttgtgttgtgtgcattcaactcacagagttgaacgatcctttacacagagcagattggaaacactctttttgtggaattgcaagaggagatttcagctgctttgaggtcaatggtagaaaaggaaatatcttcgtatgaaaactagacagaatgattctcataaactcctttgtgatgtgtgcgttcaactcacagagtttaacctttcttttcatagagcagttaggaaacactctgtttgtaaagtctgcaattggatattcagacccctttgaggcctttgttggaaacgggatttcttcatattatgctagacagaagaattctcagtaacttccttgtgttgtgtgtattcaactgacagagttgaactttcatttagagagagcagatttgtaacactgtttttgtggaatgtgcaagtggagatttcaagcgctttggggccaaaggcagaaaaggaaatatcttcgtataaaaactagacagaatcattctcagaaactgctctgcgatgtgtgcgttcaactctcagagtttaacttttcttttcattcagaagtttggaaacactgtgtttgtaaagtctgcacgtggataacttgaccacttagaggccttcgttggaaacgggtttttttcatgtaaggctagacagaagaattcccagtaacttccttgtgttgtgtgcattcaactcacagagttgaacgttcccttagacagagcagatttgaaacactctatttgtgcaatttgcaagtgtagatttcaagcgctttaaggtcaatgacagaaaaggaaatatcttcgtttcaaaactagacagaatcattcccacaaactgcgttgtgatgtgttcgttcaactcacagagtttaacctttctgttcatagagcagttaggaaacactctgtttgtaatgtctgtaagtggataatctgacatcttgtggccttcgttggaaacgggatttcttcatattctgctagacagaagaattctcagtaacttccttgtgttgtgtgtattcaaatcacagagttgcacgatcctttacacagagcagacttgaaacactctttttgtggaatttgcaagtggagatttcagccgctttgaggtcaatggtagaataggaaatatcttcctatagaaactagacagaatgattctcagaaactcctttgtgatgtgtgtgttcaactcacagagtttaacctttcttttcatagagcagttagtaaacactctgtttatgaagtctgcaagtggatattcagacccctttgaggccttcgttggaaacgggatttacttcatattctgctagacagaagaattcccagtaacttccttgtgttgtgtgtgttcaactcacagagttgaactttcatttacacagagcagatttgaaacactctttttgtggaatttgcaaatggagatttcaagcgctttgattccaaaggcagaaaaggaaatatcttcgtttcaaaactagacagaatcattctcagaaactgctctgcgatgtgtgccttcaactctcagagtttaacttttcttttcattcagcagtttggaaacactctgtttgtaaagtctgcacgtggatattttgaccacttagaggccttcgttggaaatgggtttttttcctgtaaggctagacagaagaattcccagtaacttccttgtgttgtgtacattcaactcacagagttgaacgttcccttagacagagcagatttgaaacactctttttgtgcaattggcaattggagatttcaagcgctttaaggtcaatggcagaaaaggaaatatcttcgtttcaaaactagacagaatcattcccaaaaactgcgttgtgatgtgttcgttcatctcacagagtttaacctttcttttcatagagcagttaggaaacagtctgtttgtaaattctgtaagtggatattctgacatcttgtggccttcgttggaaacgggatttcttcatattctgctagacagaagaattctcagtaactcccttgtgttgtgtgtattcaactcacagagttgaacgatcctttacacagagcagacttgaaacactctttttgtggaatttgcaagtggagatttcagccgctttgaggtcaatagtagaaaaggaaatatcttcgtagaaaaactagacagaatgattctcataaactcctttgtgatgtgtgcgttcaactcacagagtttaacctttcttttcatagagcagttaggaaacactctgtttgtaaagtctgcaagtggatattcagacctccttgaggccttcgttggaaacgggatttcttcatattatgctagacagaagaattctcagtaacttcccttgtgttgtgtgtattcaactgacagagttgaactttcatttagagagagcagatttgaaacactgtttttgtggaatttgcaattggagatttcaagcgctttggggccaaaggcagaaaaggaaatatcttcgtataaaaactagacagaatcattctcagaaactgctgcgtgatgtgtgcgttcaaccctcagagtttaacttttcttttcattcagcggtttggaaacactctgtttgtatagtctgcacgtggatattttgaccacttagaggccttcgttggaaacgggattttttcatgtaaggctagacagaagaattcctagtaacttccttgtgttgtgtacattcaactcacagagttgaacgttcccttagacagagcagatttgaaacactctttttgtgcaattggcaaatggagatttcaagcgctttaaggtcaatggcagaaaaggaaatatcttcgtttcaaaactagacagaatgattctcagaaactcctttgtgatgtgtgcgttcaactcacagagtttaacttttcttttcatagagcagttagcaaacactctgtttgtaaagtctgcaagtggatattcagacctctttgaggccttcgttggaatcgggatttcttcaaattctgctaggcagaagaattctcagtaacttccttgtgttgtgtgtattcaactcacagagttgaacgatcctttacacagagcagacttgatacactcttcttatggaatttgaaagtgtagatttcagccgctttgaggtcaatggtagaataggaaatatcttcctatggaaactagacagaatgattctcagaaactcctttgtgatgtgtgcgttcaactcatagagtttaacctttcttttcatagagcagttaggaaacactctgtttgtaaagtctgcaagtggatattcagacctctttgaggccttcgttggaaacgggtttttttcatataaggctagacagaagaattctcagtaacttccttgtgttttgtgtattcaactgacagagttgaagtttcatttagagagagcagatttgaaacactgtttttgtggaatttgcaagtggagatttcaagcgctttgggaccaaaggcagaaaaggaaatatcttcgtataaaaactagacagaatcattctcagaaactgctctgcgatgtgtgcgttcaactctcagagtttaacttttcttttcattcagcagtttggaaacactctgtttgtaaagtctgcacctggatattttgaccacttagaggccttctttggaaacgggtttttttcatgtaaggctagacagaagaattcccagtaacttccttgtgttgtgtgcattcaactcacagagttgaatgttcctttagacagagcagatttgaaacactctttttgtgcaatttgcaagtggagatttcaagcgctttaaggtcaatggcagaaaatgaaatatcttcgtttcaaaactacacagaatcattcccacaaactgcgttgtgatgtgttcgttcaactcacagagtttaacctttcttttcatagagcagttaggaaacagtctgtttgtaaattctgtaagtggatattctgacatcttgtggccttcgttggaaacgggatttcttcatactgtgctagacagaagaattctcagtaacttctttgtgttgtgtgtattcaactcacagagttgaacgatcctttacacagagcagacttgaaacactctatttgtggaatttgcaagtggagatttcagccgctttgaggtcaatggtagaataggaaatatcttcctatagaaactagacagaatgatcctcagaaactcctttgtgatgtgtgcgttcaactcacagagtttaacctttcttttcatagagcagttaggaaacactctgtttgtaaagtctgcaagtggatattcagacctccttgaggccttcgttggaaacgggatttcttcatattatgctagacagaagaattctcagtaacttccttgtgttgtgtgtattcaactgacagagttgaactttcatttagagagagcagatttgaaacactgtttttgtggaatttgcaagtggagatttcaagcgcttcggggccaaaggcagaaaaggaaatatcttcgtataaaaactagacagaatcattctcagaaactgctctgcgatgtgtgcgttcaactctcagagtttaacttttcttttcattcagcagtttggaaacactctgtttgtaaagtctgcacgtggataatttgaccacttagaggccttctttggaaacgggtttttttcatataaggctagacagaagaattcccagtaacttccttgtgttgtgtgcattcaactcacagagttgaacgttcccttagacagagcagatttgaaacactctatttgtgcaatttgcaagtgtagatttcaagcgctttaaggtcaacggcagaaaaggaaatatcttcgtttcaaaactagacagaatcattcccacaaactgcgttgtgatgtgttcgttcaactcacagagtttaacctttctgttcatagagcagttaggaaacactctgtttgtaaagtctgtaagtggatattctgacatcttgtggccttcgttggaaacgggatttcttcatattcttctagacagaagaattctcagtaacttccttgtgttgtgtgtattcaactcacagagttgaacgatcctttacacagagcagactagtaacactctttttgtggaatttgcaagtggagatttcagccgctttgaagtcaaaggtagaaaaggaaatatcttcctataaaaactagacagaatgattctgagaaactcctttgtgctgtgtgcattcaactcacagagtttaacctttcttttcatagagcagttaggaaacactctgcttgtaaagtctgcaagtggatactcagacctccttgaggccttcgttggaaacgggatttcttcctattatgctagacagaaggattcccagtaacttccttgtgttgtgtgtgttcaactcacagagttgaactttcatttacaaagagcagatttgaaacactctttttgtggaatttgccagtggagatttcaagcgctttgaggccaaaggcagaaaaggaaatatcttcgtataaaaactagacagaatcattctcagaaactgctctgcaatgtgtgcgttcaactctcagagtttaacttttcttttcattcagcagtttgtaaacactctgtttgtaaagtctgcacgtcgatgttttgaccacttagaggccttcgttggaaacgggtttttttcctgtaacgctagacagaagaattcccagtaacttccttgtgttgtgtacattcaactcacagagttgaacgttcccttagacagagcagatttgaaacactctttttgtgcaattggcaagtggtgatttcagccgctttgaggtcaatggtagaaaaggaaatatcttcgtataaaaactagacagaatcattcccacaaactgcgttgtgatgtgttcgttcaactcacagggtttaacctttctgttcatagagcagttaggaaacactctgtttgtaaagtctgtaagtggatattctgacatacttgtggccatcgttggaaacgggatttcttcatattctgctagacagaagaattctcagtaacttccttgtgttgtgtgtattctactcacagagttgaacgatcctttacacacagcagacttgaaacactctttttgtggaaattgcaagtggagatttcagccgctttgaggtcaatggtagaataggaaatatcttcctatagaaactagacagaatgattctcagaaactcctttgtgatgtgtgtgttcaactcacagagtttcacctttcttttcatagagcagttaggaaacactctgtttgtaaagtctgcaagtggatattcagacctccttgaggacttcgttggaaacgggatttcttcatattctgctagacagaagaattctcagtaacttccttgtgttgtgtttattgaactgacagagttgaactttcatttagagagagcagatttgaaacactgtttttgtggaatttgcaagtggagatttcaagcgctttggggccaaaggcagaaaacgaaatatcttcgtataaaaactagacagaatcattctcagaaactgctgcgtgatgtgtgcgttcaactctcagagtttaacttttcttttcattcagcggtttggaaacactctgtttgtaaagtctgcacgtggatattttgaccacttagaggccttcgttggaaacgggtttttttcatgtaaggctagacagaagaattcccagtaacttccttgtgttgtgtacattcaactcacagagttgaacgttcccttagacagagcagatttgaaacactctttttgtgcaattggcaagtggagatttcaagcgctttaaggtcaatggcagaaagggaaatatcttcgtttcaaaactagacagaatcattcccacaaactgcgttgtgatgtgttcgttcaactcacagagtttaacctttcttttcatagagcagttaggaaacactctgttggtaaattctgtaggtggatattctgacatcttgtggccttcgttggaaacgggatttcttcatattctgctagacagaagaattctcagaatcttccttgtgttgtgtgtattcaactcacagagttgaacgatcctttacacagagcagacttgaaacactctttttgtggaatttgcaagtggacatttcagccgctttgaggtccatggtagaaaaggaaatatcttcgtacaaaaactagacagaatgattctcagaatcttctttgtgatgtgtgcgttcaactcacagagtttaacctttcttttcatagagcagttaggaaacactctgtttgtaaattctgcaagtggatattcagacctcattgaggccttcgttgaaaacgggatttcttcatactatgctagacagaagaattcccagtaacttccttgtgttgtgtgtgttcaactcacagagttgaactttcatttacacagagcagatttgaaacactctttttgtggaatttgcaaatggagatttcaagcgctttgagaccaaaggcagaaaaggaaatatcttcgtataaaaactagacagaatcattctcagaaactgctgcgtgatgtgtgcgttcaactctcagagtttaacttttcttttcattcagcagtttggaaacactctgtttgtaaagtctgcacgtggaaattttgaccacttagaggccttcgttggaaacgggtttttttcatgtaaggctagacagaagaattcccagtaacttccttgtgttgtgtacattcaactcacagagttgaacgttcccttagacagagcagatttgaaacactctttttgtgcaattggaaagtggagattttaagcgctttaaggtcaatggcagaaaaggaaatatctccgtttcaaaactagacagaatcattcccacaaactgcgttgtcatgtgttcgttcaactcacagagtttaacctttcttttcatagagcagttaagaaacagtctgtttgtaaattctgtaagtggatattctgacatcttgtggccttcgttggaaacgggatttcttcatattctgctagacagaataattctcagtaacttccttgtgttgtgtgtattcaactcacagagttgaacgatcctttacagagagcagacttgaaaaactctttttgtggaatttgcaagtggagatttcagccgctttgaggtcaatggtagaaaaggaaatatcttcgtataaagaatagacagaatgattctcagaaacttcattgtgatgtgtgcgttcaactcacagagtttaacctttcttttcatagagcagttaggaaacactctgtttgtaaactctgcaagtggatattcacacccctttgaggccttcgttggaaacgggatttcttcatactgtgctagacagtagaattctcagtaacttccttgtgttgtgtgtattcaactcacagagttgaacgatcctttacacagagcggacttgaaacactctttttgtggaatttgcaagtggagatttcagccgctttgaggtcaatggtagaaaaggaaatatcttcgtataaaaactagacagaatcattctcagaaactgctctgcgatgtgtgcgttcaactctcagagtttaacttttcttttcattcagcagtttggaaacactctgtttgtaaagtctgcacgtggatattttgaccacttagaggcctttgttggaaacgggtttttttcctgtaaggctagacagaagaattcccagtaacttccttgcgttgtgtacattcaactcacagagttgaacgttcccttagacagagcagatttgaaacactctttttgtgcaattggcaagtggagatttcaagcgctttaaggtcaatggcagaaaaggaaatatcttcgtttcaaaactagacagaatcattcccacaaactgcgttgtgatgtgttcgttcaactcacagagtttaacctttctgttcatagagcagttaggaaacactgtgtaaagtctgttagtggatattctgacatccttgtggccttcgttggaaacgggatttcttcatattctgctagacagaataattctcagtaactcccttgtgttgtgtgtattcaactcacagagttgaacgatcctttacacagagcagacttgaaacacacttttggtggaatttgcaagtggagatttcagccgctttgaggtcaatggtagaaaaggaaatatcttcgtataaagactagacagaatgattctcagaaactcctttgtgatgtgtgtgttcaactcacagagtttaacctttcttttcatagagcagttaggaaacactctgtttgtaaagtctgcaagtggatattcagacctctttgaagccttcgttggaaacgggtttttttcatataaggttagacagaagaattctcagtaacttccttgtgttgtgtgtattcaactgacagagttgaactttcagttggagagagcagatttgaaacactgtttttgtggaatttgcaagtggagatttcaagcgctttggggccaaaggcagaaaaggaaatatcttcgtataaaaactagacagaatcattctcagaaactgctgcgtgatgtgtgcgttcaactctcagagtttaacttttcttttcattcagcggtttcgaaacactctgtttgtaaagtctgcacgtggatattttgaccacttagaggccttcgttggaaacgggttttttgcatgtaaggctagacagaagaattctcagtaacttccgtgtgttgtgtgtattcaactcaaagagttgaacgatcctttacacagagcagacttgtaacactctttttgtggaatttgcaagtggtgatttcagccgctttgaagtcaaaggtagaaaatgaaatatcttcctataaaaactagacagaatcattcccacaaactgcgttgtgatgtgttcgttcaactcacagagtttaacctttcttttcatagagcacttaggaaacagtctgtttgtaaattctgtaagtggatattctgacatcttgtggccttcgttggaaacgggatttcttcatattctgctagacagaagaattctcagaaacttccttgtgttgtgtgttttcaactcacagagttgaacgatcctttacacagagcagacttgaaacactctttttgtggaatttgcaagtggagacttcagccgcttttaggtcaatggtagaataggaaatatcttcctataaaaactagacagaatgattctcagaaactcctttgtgatgtgtgcgttcaactcacagagtttaacctttcttttcatagagcagttaggaaacactctgtttgtaaagtctgcaagtggatattcagacctctttgaggccttcgttggaaacgggttttttacaagataaggcttgacagaagaattcccagtaacttccttgtgttgtgtgtgttcaactcacagagttgaactttcatttacacagagcagatttgaaacactctttttttggaatttgcaagtggagatttcaagcgctttgaggccaaaggcagaaaaggaaatgtcttcgtttcaaaactagacagaatcattctcagaaactgctctgcgatgtgtgcgttcaactctcagagtttaacttttcttttcattcagcagtttggaaacactctgtttataacgtctgcacgtggataacttgaccacttagaggacttcgttggaaacggttttttttcctgtaaggctagacagaagaattcccagtaacttccttgcgttgtgtacattcaactcacagagttgaacgttcccttagacagagcagatttgaaacactctttttgtgcaattggcaagtggagatttcaagcgctttaaggtcaatggcagaaaaggaaatatcttcgtttcaaaactagacagaatgattctcatgaactcctttgtgatgtgtgcgttcaactcacagagtttaacctttcttttcatagagcagttaggaaacactctgtttgtaaagtctgcaagtggatattcagacctccttttggccttcgttggaaacgggatttcttcatattctgctagacagaagaattctcagtaacttccttgtgttgtgtttattcaactcacagagttgaatgatcctttacacagagcagacttgaaacacactttttgtggaaattgcaagtggagatttcagccgctttgaggtcaatggtagaaaagtaaatatcttcgtataaagactagacagaatgattctcagaaactcctttgttatgtgtgcgttcaactcacagagtttaacctttcttttcatagagcagttaggaaacactctgtttgtaaagtctgcaagtggatattcagacctctttgaggccttcgttggaaacgggtttttttcatataagtctagacagaagaattcccagtaacttccttgtgttgtgtgtgttcaactcacacagttgaactttcatttacacagagcagatttgaaacactctttttgtggaatttgaaaatggagatttcaagcgctttgaggccaaaggcagaaaaggaaatatgttcgtataaaaactagacagaatcattctcagaaactgctctgcgatgtgtgcgttcaactctcagagtttaacttttcttttcattcagcagtttggaaacactctgtttgtaacgtctgcacgtgaataatttgaccacttagaggccttcgttggaaacgggtttttttcatgtaaggctagacagaagaattcccagtaacttccttgtgttgtgtgcattcaactcacagagttgaacgttcccttagacagagcagatttgaaacactctatttgtgcaatttgcaagtgtagatttcaagcgctttaaggtcaatggcagaaaaggaaatatcttcgtttcaaaactagacagaatgattctcataaactcctttgtgatgtgtgcattcaactcacagagtttcacctttcttttcatagagcagttagaaaaaactctgtttgtaaagtctgcaagtggatattcagacctccttgaggccttcgttggaaacgggatttcttcatattatgctagacagaacaattctcagtaacttccttgtgttgcgtgtattcaactcacagagttgaacgatcctttacacagagcagacttgaaacactctttttgtggaatttgcaagtggagatttcatccgctttgaggtcaatggtggaaaaggaaatatcttcgtataaagactagacagaatgattctcagaaactcctttgtgatgtgtgtgttcaactcacagagtttaacctttcttttcatagagcagttcgtaaacactctgtttataaagtctgcaagtggatattcagacccctttgaggccttctttggaaacgggatttcttcatattatgctagacagaagaattcccagtaacttccttgtgttgtgtgtgttcaactcacacagttgaactttcatttacactgagcagatttgaaacactctttttgtggaatttgcaaatggagatttcaagcgctttgaggccaaaggcagaaaaggaaatatcttcgtataaaaactagacagaatcattctcagaaactgctctgcgatgtgtgcgttcaactctcagagtttaacttttcttctcattcagcagtttggaaacactctgtttgtaaagtctgcacgtggataatttgaccacttagaggccttcgttggaaacgggtttttttcatgtaaggctagacagaagaattcccagtaacttccttgtgttgtgtgcattcaactcacagagttgaacgttcccttagacagagcagatttgaaacactctatttgtgcaatttgcaagtgtagatttcaagcgctttaaggtcaacggcagaaaaggaaatatcttcgtttcaaaactaaacagaatcattcccacaaactgcgttgtgatgtgttcgttcaactcacagagtttaacctttctgttcatagcgcagttaggaaacactctgtttgtaaagtctgtaagtggatattctgacattttgtggccttcgttggaaatgggatttcttcatattctcctagacagaagaattctcagtaacttccttgtgttgtgtgtattcaactcacagatttgaacgatcctttacacagagcagacttgaaacgctctttttgtggaatttgcaagtggagatttcacccgcgttgaagtcaatggtagaaaaggaaatatcttcgtataaaaactagacagaatgattctcagaaactcctttgtgatgtgtgcgttcaactcacagagtttaacctttcttttcatagagcagttgggaaacactctgtttgtaaagtttgcaagtggatattcagacatccttgaggctttcgttggaaacgggatttcttcatattctgctagaaggaagaattcccagtaacttcccttgtgttgtgtgtgttcaactcacagagttgaactttcatttacacagagcagatttgaaactctctttttgtggaatttgcaaatggagatttcaagcgctttgaggtcaaaggcagaaaaggaaatatcttcgtataaaaactagacagaatcattctcagaaactgctctgcgatgtgtgcgttcaactctcagagtttaacttttcttttcattcagcagtttggaaacactctgtttgtaaagtctgcacgtggatattttgaccacttagaggccttcattggaaacgggtttttttcctgtaaggctagacagaagaattcccagtaacttccttgtgttgtgtgcattcaactcacagagttgaacgttcccttagacagagcagatttgaaacactctatttgtgcaatttgcaagtgtagatttcaagcgctttaaggtcaagggcagaaaaggaaatatcttcgtttcaaaactagacagaatcattcccacaaactgcgttgtgatgggttcgttcaactcacagagtttaacctttctgttcatagagcagttaggaaacactctgtttgtaaagtctgtaagtggatattctgacatcttgtggccttcgttggaaacgggattacttcatattctgctagacagaagaattctcagtaacttccttgtgttgtgtttattcaactcacagagttgaatgatcctttacacagagcagacttgaaacactctttttgtggaatttgtaagtggagatttcagccgctttgaggtcaatagtagaaaaggaaatatcttcgtagaaaaactacacagaatgattctcagaaactcctttgtgatgtgtgttttcaactcacagagtttaaccttccttttcatagagcagttagtaaacactctgtttataaagtctgcaagtggatattcagacccctttgaggccttcgttggaaacgggatttattcatattctgctacacagaagaattctcagtaacttccttgtgttgtgtgtattcaactgacagagttgaactttcatttagagacagcagatttgaaacactgtttttgtggaatttgcaagtggagatttcaagcgcttttgggccaaaggcagaaaaggaaatatcttcgtataaaaactagacagaatcattctcagaaactgctctgcgatgtgtgcgttcaactctcacagtttaacttttcttttcattcagcagtttggaaacactctgtttgtaaagtctgcacgtggataatttgaccacttagaggccttcattggaaacgggtttttttcatgtaaggctagacagaagaattcccagtaacttccttgtgttgtgtgcattcaactcacagagttgaacgttcccttagacagagcagatttgaaacactctatttgtccaatttgcaagtgtagatttcaagcgctttaaggtcaacggcagaaaaggaaatatcttcgtttcaaaactagacagaatcattcccacaaactgcgttgtgatgtgttcgttcaactcacagagtttaacctttcttttcatagagcagttaggaaacactctgtttgtaaagtctctaagtggatattctgacatcttgtggccttcgttggaaacgggatttcttcatattatgctatacagaagaattctcagtaacttccttgcgttgtgtgtattcaactcacagagttgaacgatcctttacacagagcagacttgaaacattctttttgtggaatttgcaagtggagatttcagccgctttgaggtcaatggtagaataggaaatatcttcctatagaaactagacagaacgattctcagaaactccattgtgatgtgtgcgttcaactcacagagtttaacctttcttttcatagagcagttaggaaacactctgtttgtaaagtctgcaagtggatattcagacctctttgaggccttcgttggaaacgggatttcttcctattctgctagacagaagaattcccagtaacttccttgtgctgtgtgtgttcaactcacagagttgaactttcatttacacagagcagatttgaaacactctttttgtggaatttgcaaatggagatttcaagcgctttgaggccaaaggcagaaaaggaaatatcttcgtttcaaaactagacagaatgattctcagaaactgctctgcgatgtgtgcgttcacctctcagagtttaacttttcttttcattcagcagtttggaaaccctctgtttgtaaagtctgcacgtgcataatttgaccacttagaggccttcgttggaaacgggtttttttcatgtaaggctagacagaagaattcccagtaacttccttgtgttgtgtacattcaattcacagagttgaacgttcccttagacagagcagatttgaaacactctttttgtgcaattggcaaatggagatttcaagcgctttaaggtcaatggcagaaaaggaaatatcttcgtttcaaaactagacagaatcattcccacaaactgcgttgtgaagtgttcgttcaactcacagagtttaacctttcttttcatagagcagttaggaaacactctgtttgtaaattctgtaagtggatattctgacatcttggggccttcgttggaaacgggatttcttcatattctgctagacagaagaattctcagtaacttccttgtgttgtgtgtattcaactcacagagttgaatgatcctttacacagtagcagacttgaaacactctttttgtggaatttgcaagtggagatttcagccgctttgaagtcaaaggtagaaaaggaaatatcttcctataaaaactagacagaatgattctcagaaactcctttgtgatgtgtgcgttcaactcacagagtttaacctttcttttcatagagcagttaggaaacactctgtttgtaaagtctgcaagtggatattcagacctctttgaggccttcgttggaaacggtatttcttcatattatgctagacagaaggattcccagtaacttccttgtgttgtgtgtgttcaactcacagagttgaactttcatatacaaagagcagatttgaaacactctttttgtggaatttgcaagtggagatttcaagcgctttgaggccaaaggcagaaaaggaaatatcttcgtataaaaactagacagaatcattctcagaaactgctctgcgatgtgtgcgttcaactctcagagtttaacttttcttttcattcagcagtttgtaaactctctgtttgtaaagtctgcacgtggatattttgaccacttagaggccttcgttggaaacgggtttttttcctgtaaggctagacagaagaattcccagtaacttccttgtgttgtgtacattcaactcacagagttgaacgttaacttagacagagcagatttgaaacactctttttgtgaaattggcaagtggagatttcaagagttttaaggtcaatggcagaaaaggaaatatcttcgtttcaaaactagacagaatcattcccacaaactgcgttgtgatgtgttcgttcaactcacagagtttaacctttctgttcatagagcagttaggaaacactctgtttgtaaagtctgtaagtggatattcagacatcttgtggccttcgttggaaacgggatttcttcatattctgctagacagaagaattctcaataacttccttgtgttgtgtttattcaactcacagagttgaatgatcctttacacagagcagacttgaaacacactttttgtggaaattgcaaatggagatttcagccgctttgaggtcaatggtagaaaagtaaatatcttcgtataaagactagacagaatgattctcagaaactcctttgtgatgtgtgcgttcaactcacagagtttaacctttgttttcatagagcagttaggaaacactctgtttgtaaagtctgcaagtggatattcagacctctttgaggccttcgttggaaacgggtttttttcatataaggctagacagaagaattctcagtaacttccttgtgttgtgtgtattcaactgacagagttgaactttcatttagagagagcagatttgaaacactgtttttgtggaatttgcaaatggagatttcaagagctttggggccaaaggcagaaaaggaaatatcttcgtataaacactagacagaatcattctcagaaactgctgcgtgatgtgtgcgttcaactctcagagtttaacttttcttttcattcagcggtttggaaacactctgtttgaaaagtctgcacgtggatattttgaccacttagaggccttcgttggaaacgggtttttttcatgtaaggctagacagaagaattcccagtaacttccttgtgttgtgtgcattcaactcacagagttgaacgttcccttagacagagcaggtttgaaacactctatttgtgcaatttgcaagtgtagatttcaagcgctttaaggtcaatggcagaaaaggaaatatcttcgtttcaaaactagacagaatcattcccacaaactgcgttgtgatgtgttcgttcaactcacagagtttaacctttctgttcatagagcagttaggaaacactctgtttgtaaagtctgtaagtggatattctgacatcttgtggccttcgttggaaacgggatttcttcgtattctgctagacagaagaattctcagtaacttccttgtgttgtgtgtattcaactcacagagttgaacgatcctttacacagagcagacttgaaacactctttttgtggaatttgcaagtggagatttcagccgctttgaggtcaatggtagaaaagtaaatatcttcgtataaagactagacagaatgattctcagatactcctttgtgatgtgtgcattcaactcacagagtttaacctttcttttcatagagcagttaggaaacactctgtttgtaaagtctgcaagtggatattcagacctccttgtggccttcgttggaaacgggatttcttcatattatgctagacagaagaattcccagtaacttccttgtgttgtgtgtgttcaactcacagagttgaactttcatttacacagagaagatttgaaacactctttttgtggaatttgcaagtggagatttcaagcgctttgaggccaaaggcagaaaaggaaatatcttcgtttcaaaactagacagaatcattctcagaaactgctctgcgatgtgtgcgttcaactctcagagtttgacttttcttttcattcagcagtttggaaacactctgtttgtaaagtctgcacgtggatattttgaccacttagaggccttcgttggaaacgggtttttttcctgtaaggctagacagaagaattcccagtaacttccttgtgttgtgtgcattcaactcacagagttgaacgttcccttagacagagcagatttgaaacactctatttgtgcaatttgcaagtgtagatttcaagcgctttaaggtcaacggcagaaaaggaaatatcttcgtttcaaaactagacagaattattctgagaaactcctttgtgatgtgtgcgttcaactcacagagtttaacctttcttttcatagagcagttaggaaacactctgtttgtaaagtctgcaagtggatattcagacctccttgaggccttcgttggaaacgggatttcttaatattatgctagacagaagaattctcagtaacttccttgtgttgtgtgtattcaactcacagagttgaacgatcctttacacagagcagacttgaaacactctttttgtgaaatttgcaagtggagatttcagccgctttgagttcaatggtagaataggaaatatcttcctatagaaactagacagaatgattctcagaaactcctttgtgatgtgtgcgtacaactcacagagtttaacctttcttttcatagtgcagttaggaaacactctgtaaagtctgcaagtggatattcagacctctttgaggccttcgttggaaacgggatttcttcatattatgctagacagaagaattctcagtaaattccttgtgttgtgtgtattcaactgacagagttgaactttcatttggagagagcagatttgaaacactatttttgtggaatttgcaagtggagatttcaagcgctttggggccaaaggcagaaaaggaaatatcttcgtataaaaactagacagaaatcattctcagaaactgctgcgtgatgtgtgcgttcaactctcagagtttaacttttcttttcattcagcggtttggaaacactctgtttgtaaagtctgcacgtggatattttgaccacttagaggccttcgttggaaacgggtttttttcatgtaaggctagacagaagaattcccagtaacttccttgtgttgtgtgcattcaactcacagagttgaacgttcccttagacagagcagatttgaaacactctatttgtgcaatttgcaagtgtagatttcaagcgctttaaagtcaatggaagaaaaggaaatatcttcgtttcaaaactagacagaatcattcccacaaactgcgttgtgatgtgttcgttcaactcacagagtttaacctttctgttcatagagcagttaggaaacactctgtttgtaaagtctgtaagtgaatgttctgacatcttgtggccttcgttggaaacgggatttcttcatattctgctagacagaagaattctcagtaacttccttgtgttgtgtgtattcaactcacagagttgaacgatcctttacacagagcagacttgaaacactctttttgtggaatttgcaagtggagatttcagcctctttgaggtcaatggtagaataggaaatatcttcctatagaaactaggcagaatgattctcagaaacttcattgtgatgtgtgcgttcaactcacagagtttaacctttcttctcatagagcagttaggaaacactctgtttgtaaactgtgcaagtggatattcagacctctttgaggccttcgttggaaacggaatttcttcatactatgctagacagaagaattctcagtaactttcttgtgttgtgtgtattcaactcacagagttgaacgatcctttacacagagcagacttgaaacactctttttgtggaatttgcaagtggagatttcaagcgctttggggctaaaggcagaaaaggaaatatcttcgtataaaaactagacagaatcattctcagaaactgctgcgtgatgtgtgccttcaactctcagagtttaacttttcttttcattcagcggtttggaaacactctgtttgtaaagtctgcacgtggaaattttgaccacttagaggccttcgttggaaacgggtttttttcatgtaaggctagacagaagaattcccagtaacttccttgtgttgtgtgtattcaactcacagagttgaactttcccttagacagagcagatttgaaacactctttttgtgcaatttggaagtggagatttcaagcgctttagggtcaatggcagaaaagaaaatatcttcatctcaaaactagacagaatcattcccacaaactgcgttgtgatgtgttcgttcaactcacagcagtttaaccttgcttttcatagagcagttaggaaacagtctgtttgtaaattctgtaagtggatattctgacatcttgtggccttccttggaaacgggatttcttcatattctgctagacagaagaattctcagtaacttccttgtgttgtgtgcattcaaatcacagagttgaaagatcctttacacagagcagattagaaacactctttttgtggaacttgcaattggatatttcagccgctttgaggtcaatggtagaaaaggaaatatcttcgtataaaaactagacagaatgattctcagaaactcctttgtgatgtgtgcgtacaactcacagagtttaacctttcttttcatagagtagttaggaaacactctgtttgtaaagtctgcaagtggatattcagacctctttgaggccttcgttggaaacgggtttttttcatataaggctacacagaagaattcccagtaacttccttgtgttgtgtgtgttcaactcacagagttgaactttcatttacacagagcagatttgaaacactctttttgtggaatttgcaactggagatttcaagcgatttgaggccaaaggcagaaaaggaaatatcttcgtttcaaaactagacagaatcattctcagaaactgctgtgcgatgtgtgcgttcaactctcagagtttaacttttcttttcattcagcagtttggaaacactctgtttgtaaagtctgcacgtggatattttgaccacttagaggccttcgttggaaacgggtttttttcctgtaaggctagacagaagaattcccagtaacttccttgtgttgtgtacattcaactcacagagttgaacgttcccttagacagagcagatttgaaacactctttttgtgcaattggcaagtggagatttcaagcgctttaaggtcaatggcagaaaaggaaatatcttcgtttcaaaactagacagaatcattcccacaaactgcgttgtgatgtgttcgttcaactcacagagtttaacctttcttttcatagagcagttaggaaacaatctgtttgtaaattctgtaagtggatattctgacatcttgtggccttcgttggaaacgggatttcttcatattgctgctagacagaagaattctcagtaacttccttgtgttgtgtgtattcaactcaaagagttgaacgatcctttacacagagcagacttgaaacactctttttgtggaatttgcaagtggagatttcagcctctttgaggtcaatggtagaataggaaatatcttcctatagaaactagacagaacgattctcagaaactcctttgtgatgtgtgcgttcaactcacagagtttcacctttcttttcatagagcagttaggaaacactctgtttgtaaagtctgcaagtggatattcagacctctttgaggccttcgttggaaacgggatttcttcatattctgctagacagaagaattcccagtaacttccttgtgttgtgtgtgttcaactcacagagttgaactttcatttacacagagcatctttgaaacactctttttgtggaatttgcaagtggagatttcaagcgctttgaggccaaaggcagaaaaggaaatatcttcgtttcaaaactagacagaatcattctcagaaactgctctgcgatgtgtgcgttcaactctcagagtttaacttttcttttcattcagcagtttggaaacactctgtttgtaaagtctgcacgtggataacttgaccacttagaggccttcgttggaaacgggtttttttcctgtaaggctagacagaagaattcccagtaacttccttgtgttgtgtgcattcaactcacagagttgaacgttcccttagacagagcagatttgaagcactctatttgtgcaatttgcaagtgtagatttcaagcgctttatggtcaatggcagaaaaggaaatatcttcatttcaaaactagacagaatcattcccacaaactgcgttgtgatgtgttcgttcaacacacagagtttaacctttctgttcatagagcagttaggaaaaactctgtttgtaaagtctgtaagtagatattctgacatcttgtggccttcgttggaaacgggatttcttcatattctgctagacagaagaattctcagtaacttccttgtgttgtgtgtattcctctcacagagttgaacgatcctttacacagagcagacttgaaaacagtctcttttgtggaatttgcaagtggagatttcagccgctttgaggtcaatggtagaaaaggaaatatcttcgtataaagactagacagaatgattctcagaaactcctttgtgatgtgtgtgttcaactcacagagtttaacctttcttttcatagagcagttaggaaacactctgtttataaagtctgcaagtggatattcagacccatttgaggccttcgttggaaacgggatttcttcatattatgctagacagaagaattctcagtaacttccttgtgttgtgtgtattcaactgacagagttgaactttcatttacagagagcagatttgaaacactgtttttgtggaatttgcaagtggagatttcaagcgctttgcggccaaaggcagaaaaggaaatatcttcgtataaagactagacagaatcattctcagaaactgctctgcgatgtgtgcgttcaactctcagagtttaacttttcttttcattcagcagtttggaaacactctgtttgtaaagtctgcacgtggatattttgaccacttagaggccttctttggaaacgggtttttttcctgtaaggctagacagaagaattcccaggaacttccttgtgttgtgtacattcaactcacagagttgaacgttcccttagacagagcagatttgaaacactctttttgtgcaattggcaaatggagatttcaagcgctttaaggtcaatggcagaaaaggaaatatcttcgtttcaaaactagacagaatgattctcataaactcctttgtgatgtgtgcgttcaactcacagagtttaacctttcttttcatagagcagttaggaaacactctgtttgaaaagtctgcaagtggatattcagacctccttgaggccttcgttggaaacgggaattcttcatattctgctagacagaagaattctcagtaacttccttgtgtggtgtgtattcaactcacagagttgaacgatcctttacacagagcagacttgaaacactctttttgtggaatttgcaagtggagatttcagccgctttgaggtcaatggtagaaaaggaaatatcttcgtataaagactagacagaatgattctcagaaactcctttgtgatgtgtgcgttcaactcacagagtttaacctttcttttcatagagcagttaggaaacactctgtttgtaaagtctgcaagtggatattcagacctccttgaggccttcgttggaaacgggatttcttcatattatgctagacacaagaattctcagtaacttccttgtgttgtgtgtattcaactcacagaattgaacgatcctttacacagagcagacttgaaacactctttttgtggaatttgcaagtggagatttcagccgctttgaggtcaatggtagaataggaaatatcttcctatagaaactagacagagatcattctcagaaactgctgcgtgatgtgtgcgttcaactctcagagtttaacttttcttttcattcagcggtttggaaacactctgtttgtaaagtctgcacgtggatattttgaccacgtagaggccttcgttggaaacgggtttttttcatgtaaggctagacagaagaattcccagtaacttccttgtgttgtgtgcattcaactcacagagttgaacgttcccttagacagagcagattggaaacactctgtgcaatttgcaagtgtagatttcaagcgctttaaggtcaacggcagaaaaggaaatatcttcgtttcaaaactagacagaatcattctcagaaactgctctgcgatgtgtgcgttcaactctcagagttcaacttttcttttcattcagcagtttggaaacattctgtttgtaaagtctgcacgtggataatttgactacttagaggccttcgttggaaacgggtttttttcatgtaaggctagacagaagaattctcagtaacttccttgtgttgtgtgtattcaactcacagagttgaacgatcctttacacagagcagacttgtaacactctttttgtggaattcgcaagtggagatttcagcagctttgaagtcaaaggtagaaaaggaaatatcttcctataaaaactagacagaatgattctcagaaactcctttgtgatgtgtgcgttcaactcacagagtttaaccattcttttcatagagcagttaggaaacactctgtttgtaaagcctgcaagtggatattctgacctccttgaggccttcgttggaaacgggatttcttcatattctgctagacagaagaattctcagtaacttccttgtgttgtgtgtattcaactcacagagttgaacgatcctttacacagagcagacttgaaacactctttttgtgtaatttgcaagtggagatttcatccgctttgaggtcaatagtagaaaagaaaatatcttcatagaaaaactagacagaatcattctcagaaactgctgcgtgatgtgtgcgttcaactctcacagtttaacttttcttttcattcagcggtttggaaacactctgtttgtaaagtctgcacgtggatattttgaccacttagagtccttcgttggaaacgggtttttttcatgtaaggctagacagaagaattcccagtaacttccttgtgttgtgtgcattcaactcacagagttgaacgtccattagacagagcagatttgaaacactctatttgtgcaatttgcaagtgtagatttcaagcgctttaaggtcaatggcagaaaaggaaatatcttcgtttcaaaactagacagaatcattcccacaaactgccttgtgatatgttcgttcaactcacagagtttaacctttctgttcatagagcagttaggaaacactctgtaacgtctgtaagtggatattctgacatcttgtggccttcgttggaaacgggatttcttcatattctgctagacagaagaattctcagtaacttccttgtgttgtgtgtattcaactcacagagttgaacgatcctttacacagagcagacttgaaacactctttttgtggaatttgcaagtggagatttcagccgctatggggtcaatggtagaataggaaatatcttcctatagaaactagacagaatgattctcataaactcctttgtgatgtgtgcgttcaactcacagagtttaacctttcttttcatagaacagttaggaaacactctgtttgtaaagtctgcaagtggatattcagacctccttgaggccttcgttggaaacgggatttcttcatattctgctagacagaagaattcccagtaacttccttgtgatgtgtgtgttcaactcacagagttgaactttcatttacacagagcagattggaaacactctttttgtggaatttgcaagtggagatttcaagcgctttgaggccaaaggcagaaaaggaaatatcttcgtataaaaactacacagaatcattctcagaaactgctctgcgatgtgtgcgttcaactctcagagtttaacttttcttttcattcagcagtttggaaacactctgtttgtaaagtctgcacgtggataatttgaccacttagaggccttcgttggaaacgggtttttttcctgtaaggctagacagaagaattcccagtaacttccttgtgttgtgtgcattcaactcacagagttgaacgttcccttagacagagcagatttgaaacactctatttgtgcaatttgcaagtgtagatttcaagcgctttaaggtcaatggcagaaaaggaaatatcttcgtttcaaaactagacagaatcattcccacaaactgcgttgtgatgtgttcgttcaactcacagagtttaacctttctgttcatagagcagttaggaaacactctgtttgtaaagtctgtaagtggatattctgacgtcttgtggccttcgttggaaacgggatttcttcatattctgctagacagaagaattctcagtaacttccttgtgttgtgtgtattcaactcacagagttgaacgatcctttacacagagcagacttgaaacattctttttgtggaatttgcaagtggagattttagccgctttgaggtcaatggtagaataggaaatatgttcctatagaaactagacagaatgattgtcagaaactcctttgtgatgtgtgcgttcaactcacagagtttaacctttctgttcatagagcagttaggaaacactctgtttgtaaagtctgcaagtggatattcagacctccttgaggccttcgttggaaacgggatttcttcatattctgctagacagaagaattctcagtaacttccttgtgttgtgtgtattcaactgacagagttgaactttcatttagagagagcagatttgaaacactgtttttgtggaatttgcaagtggagatttcaagcggtttggggccaaaggcagaaaaggaaatatcttcgtataaaaactagacagaatcattctcagaaactgctgcgtgatgtgtgcgttcaactctcagagtttaacttttcttttcattcagcggtttggaaacactctgtttgtaaagtctgcacgtggatattttgaccacttagaggccttcgttggaaacgggtttttttcatgtaagcctagacagaagaattcccagtaacttccttgtgttgtgtgcattcaagtcacagagttgaacgtttccttagacagagcagaattgaaacactctatttgtgcaatttgcaagtgtagatttcaaccgctttaaggtcaacggcagaaaaggaaatatcttcgtttcaaaactagacagaatgattctcagaaactcctttgtgatgtgtgcattcaactcacagtttaacctttcttttcatagagcagttaggaaacactctgtttgtaaagtctgcaagtggatattcagacctccttgaggccttcgttggaaacgggatttcttcatattatgctagacagaagaattctcagtaacttccttgtgttgtgtgtattcaactcacagagttgaacgatgctttacacagagcagacttgaaacactctttttgtggaatttgcaagtggagatttcagccgctttgaggtcaatggtagaaaaggaaatatcttcgtataaaaactagacagaatgattctcagaaactcctttgtgatgtgtgcgttcaactcacagagtttaacctttcttttcatagaacagttaggaaacactgtgtttgtaaagtctgcaagtggatattcagacctccttaaggccttcgttggaaacgggatttcttcatattatgctagacagaagaattctcagtaacttccttgtgttgtgtgtattcaactgacagagttgaactttcatttagagagagcagatttgaaacactgtttttgtggaatttgcaagtggagatttcaagcgctttggggccaaaactagacagaatgattctcagaaactcctttgtgatgtgtgcgttcaactcacagagtttaacctttcttttcattcagcggtttggaaacactctgtttgtaaagtctgcacgtggatattcagacctctttgaggccttcgttggaaacgggtttttttcatgtaaggctagacagaagaattcccagtaacttccttgtgttgtgtgcattcaactcacagagttgaacgttcctttagacagagcagatttgaaacactctatttgtgcaatttgcaagtgtagttttcaagctctttaaggtcaacggcagaaaaggaaatatcttggtttcaaaactagacagaatcattcccacaaactgcgttgtgatgtgttcgttcatctcacagagtttaacctttcttttcatagagcagttaggaaacagtctgtttgtacattctgtaagtggatatcctgacatcttgtggccttcgttggaaacgggatttcttcatattctgctagacagaagaattctcagtaacttccttgtgttgtgtgtattcaactcacagagttgaacgatcctttacacagagcagacttgaaacactctttttgtggaatttgcaagtggagatttcagccgctttgatttcaatggtagaaaaggaaatatcttcgtataaagactagacagaatgattctcagaaactcctttgtgatgtgtgcgttcaactcacagagtttaacctttcttttcatagagcagttaggaaacactctgtttgtaaagtctgcaagtggatattcagacatctatgaggccttcgttggaaacgggatttcttcatgttctgctagacagaagaattctcagtaactttccttgtgttgtgtgttttcaactcacagagttgaacgatcctttacacagagcagacttgaaacactccttttgtggaatttgcaagtggagatttcagccgctttgaggtcaatggtacaataggaaatatcttcctatagaaagtagacagaatgattctgagaaactcctttgtgatgtgtgcgttcaactcacagagtttaacctttcttttcatagagcagttaggaaacactctgtttgtaaagtctgcaagtggatattcagacatctttgaggctttctttggaaacgggatttcttcatattctgctatacagaagaattctcagaaacttccttgtgttgtgtgtattcaactcacagagttcaacgatcgtttacacagagcagacttgagacactctttttgtggaatttgcaagtggagatttcagccgctttgaggtcaatggtagaaaaggaaatatcttcatataaaaaatagacagaatcattcccacaaactgcgttgtgatgtgttcgttcaactcacagagtttaaccttcctgttcatagagcagttaggaaacactctgtttgtaaagtctgtaagtggatattctgacatcttgtggccttcgttgggaacgggatttcttcatattctgctagacagaagaattctcagaatcttccttgtgttgtgtgtattcaactcacagagttgaacgatggtttactcagagcagatttgaaacactctttttgtggaatttgcaagtggagatttcagccgctttgaggtcaatggtagaaaaggaaatatcttcgtacaaaaactagacagaatgattctcagaaactcctttgtgatgtgtgcgttcaactcacacagtttaacctttcttttcatagagcagttaggaaacactctgtttgtaaagtctgcaagtggatattcacacctccttgaggccttcgttggaaacgggatttcttcatattatgctagacagaagaattcccagtaacttccttgtgttgtgtgtgttcaactcacagagatgaactctcatttacacagagcagatttgaaactctctttttgtgtaatttgcaaatggagatttcaagcgctttgaggccaaaggcagaaaaggaaatatcttcgtataaaaactagacagaatcattctcagaaactgctctgcgatgtgtgcgttcaactctcagagtttaacttttcttttcattcagcagtttggaaacactctgtttgtaaagtctgcacgtggatattttgaccacttagaggccttcgttggaaacgggattttttcctgtaaggctagacagaagaattcccagtaacttccttgtgttgtgtgtgttcaactcactgagttgaactttcatttacccagagcagatttgaaacactctttttgtggaatttgcaagtggagatttcaagcgctttgaggccaaaggcagaaaaggaaatatcttcgtttcaaaactagacagaatcattctcagaaactgctctgcaatgtgtgcgttcaactctcagagtttaacttttcttttcattcagcagtttggaaacactctgtttgtaaagtctgcacgtggataatttgaccacttagaggccttctttggaaacgggtttttttcatgtaaggctagacagaagaattctcagtaacttccttctgttgtgtgtattcaactcacagagttgaacgttcctttacacacagcagacttgaaacactctttttgtggaatttgcaagtggagatttcagccgctttgtggtcaatggtagaaaaggaaatatcttcgtataaaaactagacagaatgattctcagaaactcctttgtgatgtgtgtgttcaactcacagagtttaacctttcttttcatagagcagttaggaaacactctgtttgtaaagtctgcaagtggatattcagacctctttgaggccttcgttggaaacgggtttttttcatgtaaggctagacagaagaattctcagtaacttccttgtgttgtgtgtattcaactgacagagttgtactttcgtttagagagagcagatttgaaacactgtttttgtggaatttgcaagtggagatttcaagcgctttggggccaaaggcagaaaaggaaatatcttcgtataaaaactagacagaatcattctcagaaactgctgcgtgatgtgtgctttcaactctcagagtttaacttttcttttcattcagcggtttggaaacactctgtgtgtaaagtctgcacgtggatattttgaccacttagaggccttcgttggaaacgggtttttttcatgtaaggctagacagaagaattctcagtaacttccttgttttgtgtgtattcaactcacagagttgaacgatcctttacacagagcagacttgtaacactctttttgtggaatttgcaagtggagatttcagccgctttgaagtcaaaggtagaaaaggaaatatcttcttataaatactaaacagaatcattcgcacaaactgcgttgtgatgtgttcgttcaactcacagagtttaacctttcttttcatagagcagttaggaaacagtctgtttgaaaattctgtaagtggatattctgacatcttgtggccttcgttggaaacgggatttcttcatattctgctagacagaagaattctcagaatcttccttgtgttgtgtgtattcaactcacagagttgaacgatggtttacacagagcagatttgaaacactcatttggtggaatttgcaagtggagatttcagccgctttgaggtcaatggtagaaaaggaaatatcttcgtataacaactagacagaattattctcagaaactcctttgtgatgtgtgcgttcaactcacagagtttaacctttcttttcatagagcagttaggaaacactctgtttgtaaggtctgcaagtggatattcagagatccttgaggccttctttggaaacgggatttcttcatattatgctggacagaagaattctcagtaacttccttgtgttgtgtgtattcaactgacagagttgaactttcatttagagagagcagatttgaaacactgtttgtgtggaatttgcaagtggagatttcaagcgctttggggccaaaggcagaaaaggtaatatcttcgtataaaaactagacagaatcattctcagaaactgctctgcgatgtgtgcgttcaactctcagagtttaacttttcttttcattcagcagtttggaaacactctgtttgtaaagtctgcacgtggataatttgaccacttagaggccttcattggaaacgggtttttttcctgtaaggctagacagaagaattcccagtaacttcccttgtgttgtgtacattcaactcacagagttgaacgttcccttagacagagcagatttgaaacactctttttgtgcaattggcaagtggtgatttcagcctctttgaggtcaatggtagaaaaggaaatatcttcgtataaaaactagacagaatgattctcagaaactcctttgtgatgtgtgtgttcaactcacagagtttaacctttcttttcatagagcagttaggaaacactctgtttgtaaagtctgcaagtggatattcagacctgctttgaggccttcgttggaaacgggtttttttcatataaggctagacagaagaattcccagtaacttccttgtgttgtgtgtgttcaactcacagagttgaactttcatttacacagagcagatttgaaacactctttttgtggaatttgcaagtggagatttcagccgctttgaggtcaatggtagaaaaggaaatatcttcgtataaaaactagacagaatgattctcagaaactcctttgtgatgtgtgcgttcaactcacagagtttaacctttcttttcatagagcagttaggaaacactctgtttgtaaactctgcaagtggatattcagacctctttgaggccttcgttggaaacgggatttcttcatactatgctagacagaagaattcttagtaacttccgcgtgttgtgtgtattcaactcacagagttgaacgatcctttacacagagcagacttgaaacactctttttgtggaatttgcaagtggagatttccgccgctatgtggtcaatggtagaaaaggaaatatcttcctataaaaactagacagaatcattctcagaaactgctgcgtgatgtgtgcgttcaactctcagagtttaacttttcttttcattcagccgtttggaaacactctgtttgtaaagtctgcacgtggatattttgaccacttagaggccttcgttggaaacgggttttttgcatgtaaggctaaacagaagaattcccagtaacttccttgtgttgtgtgcattcaactcacagagttgaacgttcccttaggcagagcagatttgaaacactctatttgtgcaatttgcaagtgtagatttcaagcgctttaaggtcaatggcagaaaaggaaatatcctcgtttcaaaactagacagaatgattctcagaaaattctttgtgatgtgtgcgttccactcacagagtttaacctttcttttcatagagcagttaggaaacactctgtttgtaaactctgcaagtggatattcagacctctttgaggccttctttgcaaacgggatttcttcatattatgcctgagagaagaattctcagtaacttcccttgtgctgtgtgtattcaactcacagagttgaacgatcctttacacagagcagacttgatacactctttttgtggaatttgcaagtggagatttcagccgctttgaggtcaatggtagaaaaggaaatatcttcgtataaaaactagacagaaatgattctcataaactcctttgtgatgtgtgcgttcaactcacagagtttaacctttcttttcatagagcagttaggaaacactctgtttgtaaagtgtgcaagtggatattcagacctccttgaggccttcgttggaaacgggatttcttcatattctgctagacagagaattcccagtaacttccttgtgttgtgtgtgttcaactcacacagttgaactttcatttacacagagcagatttgaaacactctttttgtggaatttgcaaatggagatttcagccgcgttgaggtcaacggtagaaaaggaaatatcttcgtttcaaaactagacagaatcattctcagaaactgctgcatgatgtgtgcgttcaactctcagagtttaacttttcttttcattcagcggtttggaaacactctgtttgtaaagtctgcacgtggatattttgaccacttagaggccttcgttggaaacgggtttttttcatataaggctagacagaagaattcccagtaacttccttgtgttgtgtgcattcaactcacagagttgaacgttcccttagacagagcagatttgaaacactctatttgtgcaatttccaagtgtagatttcaagcgctttaaggtcaacggcagaaaaggaaatatcttcgtttcaaaactagacagaatgattctcagaaacttctttgtgatgtgtgcgttcaactcacagagtttaacctttcttttcatagagcagttaggaaacagtctgtttgaaaattctgtaagtggatattctgacatcttgtggccttcgttggaaacgggatttcttcatattctgctagacagaagaattgtcagtaacttccttgtgttgtgtgtattcaactcacagagttgaatgatcctttacacagagcagacttgaaacactctttatgtggaatttgcaagtggagatttcagccgctttgagttcaatggtagaataggaaatatcttcctatagaaactagacagaatgattctcagaaactcctttgtgatgtgtgcgttcaactcacagagtttatcctttcttttcatagagcagttaggaaacactctgtttgtaaagtctgcatgtggatattcagacatcattgaggccttcgttggaaacgggatttcttcatgttctgctagacagaagaattctcagtaacttccttgtgttgtgtgtattcaactgacagagttgaactttcatttagagagagcagatttgaaacactgtttttgtggaattttcaagtggagatttcaagcgctttggggccaaaggcagaaaaggaaatatcttcgtataaaaactagacagaatcattctcagaaactgctctgcgatgtgtgcgttcaactatcagagtttaactttgcttttcattcagcagtttggaaacactctgtttgtaaagtctgcacgtggataatttgaccacttagaggccttcgttggaaacgggtttttttcatgtaaggctagacagaagaattcccagtaacttccttgtgttgtgtacattcaactcacagagttgaacgttcctttagacagagcagatttgaaacactctttttgtgcaattggcaaatggagatttcaagcgctttaaggtcaatggcagaaaaggaaatatcttcgtttcaaaactagacagaatcattcccacaaactgcgttgtgatgtgttcgttcaaatcacagagtttaaactttcttttcatagagcagttaggaaacagtctgtttgtaaattctgtaagtggatattctgacatcttgtggcctacgttggaaacgggatttcttcaaattctgctagacagaataattctcagtaacttccttgtgttgtgtgtattcaactcacagagttgaacgatcctttacagagagcaggcttgaaacagtctttttgtcgaatttgcaagtggagatttcagccgctttgaggtcaatggtagaataggaaatatcttcttatagaaactagacagaatgattctcagaaactcctttgtgatgcgtgcgttcaactcacagagtttaacctttcttttcatagagcagttaggaaacactctgtttgtaaagtctgcaagtggatattcagacatccttgaggctttcgttggaaacgggatttcttcatattctgctagaaagaagaattctcagtaacttccttgtgttgtgtgtattcaactgacagagttgaactttcatttagagagagcagatttgaaacactgtttttgtggaatttgcaagtggagatttcaagcgctttgtggccaaaggcagaaaaggaaatatcttcgtataaaaactagacagaatcattctcagaaactgctgcgtgatgtgtgcgttcaactctcagagtttaacttttcttttgattcagcggtttggaaacactctgtttgtaaagtctgcacgtggatattttgaccacttagaggccttcgttggaaacgggtttttttcatgtaatgctagacagaagaattcccagtaacttccttgttttgtgtgcattcaactcacagagtttaacgttcccttagacagagcagatttgaaacactctatttgtgcaatttgcaagtgtagatttcaagcgctttaaggtcaacggcagaaaaggaaatatcttcgtttcaaaactagacagaatcattcccacaaactgcgttgtgatgtgttcgttcaactcacagagtttaacctttctgttcatagagcagttaggaaacactctgtttgtaaactctgtaagtggatattctgacatcttgtggccttcgttggaaacgggatttcttcacattctgctagacagaagaattctcagtaacttccttgtgttgtgtgtattcaactcacagagttgaatgatcctttacacagaacagtcttgaaacactctttttgtggaatttgctagtggagatttcagccgctttgatgtcaatggtagaataggaaatatcttcctatagaaactagacagaatgattctcagaaactcctttgtgatgtgtgcgttcaactcacagagtttaacctttcttttcatagagcagttaggaaacactctgtttgtaaagtctgcaagtggatattcagacctctttgaggccttcgttggaaacgggtttttttcatataaggctagagagaagaattcccagtaacttccttgtgttgtgtgtgttcaactcacagagttgaactttcatttacacagagcagatttgaaacactctttttgtggaatttgcaaatggagatttcaagcgctttgaggccaaaggcagaaaaggaaatatcttcgtataaaaactggacagaatcattctcagaaactgctctgcgatgtgtgcgttcaactctcagagtttaacttttcttttcattcagcagtttggaaacactctgtttgtaaagtctgcacgtggataacttgaccgcttagaggccttcgttggaaacgggtttttttcacgtaaggctagacagaagaattcccagtaacttccttgtgttgtgtgcattcaactcacagagttgaacgttcccttagacagagcagatttgaaacactctacttgtgcaatttgcaagtgtagatttcaagcgctttaaggtcaatggcagaaaaggaaatatcttcgtttcaaaactagacagaatcattcccacaaactgcgttgtgatgtgttcgttcaactcacagagtttaacctttctgttcatagagcagttagaaaacactctgtttgtaaagtctgtaagtggatattctgacattttgtggccttcgttggaaatgggatttcttcatattctgctagacagaagaattctcagtaacttccttgtgttgtgtgtattcaactcacagagttgaactatcctttacacagagcagacttgaaacactcgttttgtggaatttgcaagtggagatttcagccgctttgaggtcaatggtagaaaaggaaatatcttcgtataaaaactagacagaatgattctcagaaactcctttgtgatgtgtgtgttcaactcacagagtttaacctttcttttcatagagcagttaggaaacactctgtttgtaaagtctgcaggtggatattcagacctctttgaggccttcgttggaaacgggtttttttcatataaggctagacagaagaattcccagtaacttccttgtgttgtctgtgttcaactcacagagttgaactttcatttacacagagcagatttgaaacactctttttgtggaatttgcaagtggagatttcaagcgctttgaggccaaaggcagaaaaggaaatatcttcgtttcaaaactagacagaatcattctcagaaactgctctgcgatgtgtgcgttcaactctcagagtttaacttttcttttcattcagcagtttggaaacactctgtttgtaaagtctgcacgtggataacttgaccacttagaggccttcgttggaaacgggtttttttcatgtaaggctagacagaagaattctcagtaacttccttgtgttgtctgtattcaactcacagagttgaacgatcctttacagagagcagacttgtaacactctttttgtggaatttgcaagtggagatttcagccactttgaagtcaaaggtagaaaaggaaataacttcctataaaaactagacagaatcattcccacaaactccgttgtgatgtgttcgttcaactcacagagtttaacctttctgttcatagagcagttaggaaacactctgtttgtaaagtctgtaagtggatattctgacatcttgtggccttcgttggaaacgggatttcttcatattctgctagacagaagaattctcagtaacttccttgtgttgtgtgtattcaactcacagagttgaacgatcctttacacagagcagacttgaaacactctttttgtggaatttgcaagtggagatttcagccgctttgaggtcaatggtagaaaaggaaatatgttcgtataaagattagacagaatgattctcagaaactcctttgtgatgtgtgtgttcaactcacagagtttaacctttcttttcatagagcagttagtaaacactctgtttataaagtctgcatgtggatattcagacccctttgaggccttcgttggaaacgggatttcttcatattatgctagacagaagaattcccagtaacttccttgtgttgtgtgtgttcaactcacagaattgaactttcatttacccagagcagatttgaaacactctttttgtggaatttgcaagtggagatttcaagcgctttgaggccaaaggcagaaaaggaaatatcttcgtttcaaaactagacagaatcattctcagaaactgctctgcgatgtgtgcgttcaactctcagagtttaacttttcttttcattcagcagtttggaaacactctgtttgtaaagtctgcacgtggatattttgaccatttagaggccttcgttggaaacgggtttttttcttgtaaggctagacagaagaattcccagtaacttccttgtgttgtgtacattcaactcacagagttgaacgttcccttagacagagcagatttgaaacactctttttgtgcaattggcaagtggagatttcaagcgctttaaggtcaatggcagaaaaggaaatatcttcgtttcaaaactagagagataatcattcccacaaactgcgttgtgatgtgttcgttcaactcacagagtttaacctttcttttcatagagcagttaggaaacagtctgtttgtcaattctgtaagtggatattctgacatcttgtggccttcgttggaaacgggatttcttcatattctgctagacagaagaattctcagtaacttccttgtgttgtgtgtattcaactcacagagttgaacgatcctttacacagaacagacttataacactctttttgtggaatttgcaagtggagatttcagccactttgaagtcaaaggtagaaaaggaaataacttcctataaaaactagacagaatgattctcagaaacttctttgtgatgtgtgcgttcaactcacagagtttaacctttcttttcatagagcagttaggaaacactctgtttgtaaactctgcaagtggaaattcagacctctttgaggccttcgttggaaacgggatttcttcatactatgctagacagaagaattcccagtaacttccttgtgttgtgtgtgttcaagtcacagagttgaactttcatttacacagagaagatttgaaacactgtttttgtggaatttgcaagtggagatttcaagcgctttgaggccaaaggcagaaaaggaaatatcttcgtttcaaaactagacagaatcattctcagaaactgctctgcgatgtgtgcgttcaactctcagagtttaacttttcttttcattcagcagtttggaaacactctgtttgtaaagtctgcacgtggatattttgaccacttagaggccttcgttggaaacgggtttttttcatgtaaggctagacagaagaattctcagtaacttccttgtgttgtgtgtattcaactcacagagttgaacgatcctatacacagagcagacttgtaacactctttttgtggaatttgcaagtggagatttcagccgctttgaagtcaaaggtagaaaaggaaatatcttcctataaaaactagacagaatgattctcagcaaactcctttgtgatgtgtgcgttcaactcacagagtttaactttttttttcatagagcagttaggaaacactctgtttgtaaagtctgcaagtggatattcagacctctttgaggccttcgttggaaacgggtttttttcatataaggctagacagaagaattctcagtaacttccttgtgttgtgtgtattcaactcacagagttgaacgatcctttacacagagcagacttgaaacactcttttagtggaatttgcaagtggagatttcagccgctttgaggtcaatggtagaataggaaatatcttcctatagaaactagacagaatgattttcagaaactcctttgtgatgtgtgcgttcaattcacagactttaacttttcatagagcagttaggaaacactctgtttgtaaagtctgcaagtggatattcagacctctttgaggccttcgttggaaacgggatttcttcatattatgctagacagaagaattctcagtaacttcctggtgttgtgtgtattcaactgacagagttgaactttcatttagagagggcagatttgaaacactgtttttgtggaatttgcaagtggagatttcaagcgctttggggccaaaggcagaaaaggaaatatcttcgtataaaaactagacagaatcattctcagaaactgctctgcgatgtgtgcgttcaactctcagagtttaactttgcttttcattcagcagttttgaaacactctgtttgtaaagtctgcacgtggataatttgaccacttagaggccttcgttggaaacgggtttttttcatgtaaggctagacagaagaattcccagtaacttccttgtgttgtgtgcattcaactcacagagttgaacgttcccttagaccgagcagatttgacacactctatttgtgcaatttgcaagtgtagatttcaagcgctttaaggtcaacggcagaaaaggaaatatcttcgtttcaaaactagacagaatcattcccacaaactgcgttgtgatgtgttcgttcaactcacagagtttaacctttcttttcatagagcacttaggaaacagtctgtttgtaaattctgtaagtggatattctgacatcttgtggccttcgttggaaacgggatttcttcatattctgctagacagaagaattctcagaatcttccttgtgttgtgtgtattcaactcacagagttgaacgatccttttcacagagcagacttgaaacactgtttttgtggaatttgcaagtggagatttcagccgcgttgaggtcaatggtagaaaaggaaatatcttcgtataaaaactagacagaatgattctcagaaacttctttgtgacgtgtgcgttcaactcacagagtttaacctttcttttcatagagcagttaggaaacactctgtttgtaaactgtgcaagtggatgttcagacctctttgaggccttcgttggaatcgggatttcttcatactgtgctagacagaagatttctcagtaacttccttgtgttgtgtgtattcaactcacagagttgaacgatcctttacacagagcggacttgaaacactctttttgtggaatttgcaagtggagatttcagccgcgttgaggtcaatggtagaaaaggaaatctcttcgtataaaaactagacagaatcattctcagaaactgctctgcgatgtgtgcgttcaactctcagagtttaacttttcttttcattcagcagtttggaaacactctgtttgtaaagtctgcacgtggatattttgaccacttagaggacttcgttggaaacgggtttttttcctgtaaggctagacagaagaattcccagtaacttccttgtgttgtgtacattcaactcacagagttgaacgttcccttagacagagcagatttgaaacactctttttgtgcaattggcaagtggagatttcaagcgctttaaggtcaatggcagaaaaggaaatatcttcgtttcaaaactagacagaatcattcccacaaactgcgttgtgatgtgttcgttcaactcacagagtttaacttttcttttcatagagcagttaggaaacactctgtttgtaaagtctgcaagtggatattcagacctccttgaggccttcgttggaaacgggatttcttcatattctgctagacagaagaattctcagtaacttccttgtgttgtgtgtattcaactcacagagttgaacgatcctttacacagagcagacttgaaacactctatttgtagaacttgcaagtggagatttcagccgctttgaggtcaatagtagaaaaggaaatatcttcgtagaaaaactagacagaatgattctcagatactcctttgtgatgtgtgcgttcaactcacagagtttaacctttcttttcatagagcagttaggaaacactgcgtttgtaaagtctgcaagtggatattcagacctccttgaggccttcgttggaaacgggatttcttcatattatgctagacagaagaattcccagtaacttccttgtgttgtgtgtgtttaactcacagagttgaactttgatttacacagagcagatttgaaacactctttttgtggaatttgcaagtggagatttcaagcgctttgaggccaaaggcagaaaaggaaatatcttcgcataaaaactagacagaatcattctcagaaactgctgcgtgatgtgtgcgttcaactctcagagtttaacttttcttttcattcagcggtttggaaacactctgtttgtgaagtctgcccgtggatattttgaccccttagaggccttcgttggaaacgggtttttttcatgtaaggctagacagaagaattctcagtaacttccttgtgttgtgtacattcaactcacagagttgaacgttcccttagacacagcagatttgaaacactctttttgtgcaattggcaagtggagatttcaagcgctttgaggtcaatggcagaaaaggaaatatcttcgtttcaaaactagacagaatcattcccacaaactgcgttgtgatgtgtgcgttcaactcaaagagtttaacctttcttttcataaagcagttaggaaacactctgtttgtaaagtctgcaagtggatattcagacctccttgaggccttcgttggaaacgggatttcttcatattctgctagacagaagaattctcagtaacttccttgtgttgtgtgtattcaactcacagagttgaaggatcctttacacagagcagacttgaaacactctttttgtggaatttgcaagtggagatttcagccgctttgaggtcaatggtagaaaaggaaactatcttcatataaagactagacagaatgattctcagaatctcctttatgatgtgtgcgttcaactcacagagtttaacctttcttttcatagagcagttaggaaacactctgtttgtaaagtctgcaagtggatattcagacctctttgaggccttcgttggaaacgggtttttttcatataagactagacagaagaattctcagtaacttccttgtgttgtgtgtattcaactcacagagttgaactttcatttacacagagcagatttgaaacactctttttgtggaatttgcaaatggagatttcaagcgctttgaggccaaaggcagaaaaggaaatatcttcgtataaaaactagacagaatcattctcagaaactgctctgcgatgtgtgcgttcaactctcagattttaacttttcttttcattcagcagtttggaaacactctgtttgtaaagtctgcacgtggatattttgaccacttagaggccttcgttggaaacggggttctttcctgtaaggctagacagaataattcccagtaacttcctagtgttgtgtgcattcaactcacagagatgaacgttcccttagacagagcagatttgaaacactctgtgcaatttgcaagtgtagatttcaagcgctttaatgtcaatggcagaaaaggaaatatcttcgcttcaaaactagacagaatcattcccacaaactgcgttgtgatgtgttcgttcaactcacagagtttaacctttcttttcatagagcagttaggaaacagtctgtttgtcaattctgtaagtggatattctgacatcttgtggcattcgttggaaacgggatttcttcatattctgctagacagaagaattctcagtaacttccttgtgtagtgtgtattcaactcacagagttgaacgatcctttacacagagcagagttgaaacactctttttgtggaatttgcaagtggagatttcaggcgctttgaggtcaatggtagaaaaggaaatatcttcgtataaagactagacagaatgattctcagaaactcctttgtgatgtgtgcgttcaactcacagagtttaacctttctattcatagagcagttaggaaacactctgtttgtcaagtctgcaagtggatactcagacctctttgaggccttcgttggaaacgggtttttttcatataaggctagacagaagaattctcagtaacttccttgtgttgtgtgtattcaactgacagagttgaactttcatttagagagagcagatttcaaacactgtttttgtggaatttgcaagtggagatttcaagcgctttggggccaaaggcagaaaaggaaatatcttcgtataaaaactagacagaatcattctcagaaactgctctgtgatgtgtgcgttcaactctcagagtttaacttttcttttcattcagtactttggaaacactctgtttgtaaagtctgcacgtggatattttgaccacttagaggccttcgatggaaacggggttttttcatttaaggctagacagaagaattcccagtaacttccttgtgttgtgtgcattcaactcacagagatgaacgttcccttagacagagcagatttgaaacactctatttgtgcaatttgcaagtgtagatttcaagctctttaaggtcaatggcagaaaaggaaatatctttgtttcaaaactagacagaatcattcccacaaactgcgttgcgatgtgttcgttcaactcacagagtttaacatttcttttcatagagcacttaggaaacagtctgtttgtaaattctgtaagtggatattctgacatcttgtggccttcgttggaaacaggatttcttcatattctgctagacagaagaattctcagtaacttccttgtgttgtgtgtattcaactcacagacttgaaggatcctttacagagaggaggcttgaaaccctctttttgtcgaatttgcaagtggagatttcagccgctttgaggtcaatggtagaataggaaatatcttcttatagaaactagacaaaatgattctcagaaactcctttgtgatgtgtgcgttcaactcacagagtttaacctttcttctcatagagcagttaggaaacactctgtttgtaaagtctgcaagtggatattcagacctctttgaggccttcgttggaaacgggtttttttcatataaggctagacagaagaattcccagtaacttccttgtgttgtgtgtgttcaactcacagagttgaactttcatttacacagagcagatttgaaacactctttttgtggaatttgcaagtggagatttcaagcgctttgaggccaaaggcagaaaaggaaatatcttcgttgcaaaactagacagaaatcattctcagcaaactgctgcgtgatgtgtgcgttcaactctcagagtttaacttttcttttcattcagcggtttggaaacactctgtttgtaaagactgcacgtggatattttgaccacttagaggccttcgttggaaaggggttttttttcatgtaaggctagacagaagaattcccagtaacttccttgtgttgtgtacattcaactcacagagttgaacgttcccttagacagagcagatttgaaacactctttttgtgcaattggcaagtggagatttcaagcgctttgaggtcaatggcagaaaaggaaatatcttcctttcaaaactagacagaatcattcccacaaactgcgttgtgatgtgttcgttcaactcacagagtttaacctttctgttcatagagcagttagcaaacactctgtttgtaaagtctgtaagtggatattcagacatcttgtggccttcgttggaaacaggatttcttcatattctgctagacagaagaattctcagaatcttccttgtgttgtgtgtattcaactcacagagttgaacgatggtttacacacagcagatttgaaacactctttttgtggtatttgcaagtggagatttcagccgctttgaggtcaatggtagaaaaggaaatatcttcgtataaaaactagacagaacgattctcagaaactcctttgtgatgtgtgcgttcaactcacagagtttaacctttctgttcatagagcagttaggaaacactctgtttgtaaagtctgcaagtggatattcagacctctttgaggccttcgttggaaacgggatttcttcatattctgctagacagaagaattcccagtaacttccttgtgttgtgtgtgttcaactcacagagttgaactttcatttacgcagagcagatttgaaacactctttttgtggaatttgcaagtggagatgtcaagcgctttgaggccaaaggcagaaaaggaaatatcttcgtttcaaaactagacagaatcattctcagaaactgctctgcgatgtgtgcgttcaactctcagagtttaacttttcttttcattcagcagtttgaaaacactctgtttgtaaagtctgcacgtggatattttgaccacttagaggccttcgttggaaacgggtttttttcctgtaaggctagacagaagaattcccagtaacttccttgtgttgagtacattcaactcacagagttgaacgttcccttagacagagcagatgtgaaacactctttttgtacaattggcaagtggagatttcaagcgctttaaggtcaatggcagaaaaggaaatatcttcgtttcaaaactagacagaatgattctcagaaacttctttgtgatgtgtgcgttcaactcacagagtttaacctttcttttcatagagcagttaggaaacactctgtttgtaaactctgcaagtggatattcagacctctttgaggccttcgttggaaacgggatttcttcatactgtgctagacataagaattctcagtaacttccttgtgttgtgtgtattcaactcacagacttgaatgatcctttacacagagcagacttgaaacactctttttgtggaatgtgcaagtggagatttcagccgctttgtggtcaatggtagaataggaaatatcttcctatagaaactagacagaatgattctcagaaactcctttgtgatgtgtacgttcaactcacagagtttaacctttcttttcatagagcagttaggaaacactctgtttgtaaagtctgcaagtggatattgagacctctttgaggccttcgttggaaacgggttttttacatataaggctagacagaagaattcccagtaagttccttgtgttgtgtgtgttcaactcacagagttgaactttcatttacacagagcagatttgaaacactctttttgtggaatttgcaaatggagatttcaagcgctttgaggccaaaggcagaaaaggaaatatcttcgtataaaaactagacagaatcattctcagaaactgctctgcgatgtgtgcgttcaactctcagagtttaacttttcttttcattcagcagtttggaaacactctgtttgtaaagtctgcacgtggataatttgaccacttagaggccttcgttggaaacgggtttttttcctgtaaggctagacagaagaattctcagtaacttccttgtgttgtgtgtattcaactcacagagttgaacgatccttcacacagagcagacttggaaaactctttttgtggaatttgcaagtggagatttcagccgctttgaagtcaaaggtagaaaaggaaatatattcctataaaaagtagacagaatcattcccacaaactgcgttgtgatgttttcgttcaactcacagagtttaacctttcttttcatagagcagttaggaaacactctgttggtaaattctgtaagtggatattctgacatcttgtggccttcgttggaaacgggatttcttcatattctgctagacagaagaattctcagtaacttccttgtgttgtgtgtattcaactcacagagttgaacgatcctttacacagagcagacttgaaacactctttttgtggaatttgcaagtggagatttcagccgctttgagctcaatggtagaataggaaatatcttcctatagaaactagacagaacgattctcagaaactcctttgtgatgtgtgcgttcaactcacagagtttaacttttcttttcatagagcagttagtaaacactctgtttataaagtctgcaagtggatattcagacccctttgaggccttcgttggaaacgggatttcttcatattatgctagacagaagaattctcagtaacttccttgtgttgtgtgtattcaactgacagagttgaactttgatttagagagagcagatttgaaacactgtttttgtggaatttgcaagtggagatttcaagcgctttggggccaaaggcagaaaaggaaatatcttcgtataaaaactagacagaatcattctcagaaactcctttgtgatgtgtgcgttcaactctcagagtttaacttttcttttcattcagcggtttggaaacactctgtttgtaaagtcagcacgtggaaattttgaccacttagaggccttcgttggaaacgggtttttttcatgtaaggctagacagaagaattcccaggaacttccttgtgttgtgtacattcaactcacagagttgaacgttcccttagacagagcagatttgaaacactctttttgtgcaattggcaagtggtgatttcagccgcattgaggtcaatggtagaaaaggaaatatcttcgtataaaaactagacagataatcattcccacaaactgcgttgtgatgtgttcgttcaactcacagagtttaacctttcttttcatagagcagttaggaaacactctgttggtaaattctgtaagtggatattctgacatcttgtggccttcgttggaaacgggatttctacatattctgctagacagaagaattctcagtaacttccttgtgttgtgtgtattcaactcacagagttgaccgatcctttacacagagcagacttgtaacactctttttgtggaatttgcaagtggagatttcagccgttttgaagtcaaaggtagaaaagggaatatcttcctataaaaactagacagaatgattctcagaaactcctttgtgatgtgtgcgttcaactcacagagtttaacttttcttttcatagagcagttaggaaacactctgtttgtaaagtctgcaagtggatattcagacctccttgaggccttcattggaaacgggatttcttcatattctgctagacagaagaattctcagtaacttccttgtgttgtgtgtattcagctcacagggttgaacgatcctttatacagagcagacttgaaacactctttttgtgggacttgcaagtggagatttcagccgctttgaggtcaataattgaaaaggaaatatcttcgtagaaaaactagacagaatcattctcagaaactgctgcgtgatgtgtgcgttcaactctcagagtttaacttttcttttcattcagcggtttggaaacactctgtttgtaaagactgcacgtggatattttgaccacttagaggccttcgttggaaacgggttttttttcatgtaaggctagacagaagaattcccagtaacttccttgtgttgtgtgcattcaactcacagagttgaacgttcccttaggcagagcagatttgaaacactctatttgtgcaatttgcaagtgtagatttcaagcgctttaaggtcaacggcagaaaaggaaatatcttcgtttcaaaactagacagaatcattcccacaaactgcgttgtgatgtattcgttcaactcacagagtttaacctttctgttcatagagcagttaggaaacactctgtttgtaaagtatgcaagtggatattcagacctccttgaggccttcgttggaaacgggatttcttcatattctgctagacagaagaattctcagtaacttccttgtgttgtgtgtattcaactcacagggttgaacgatcctttatacagagcagacttgaaacactctttttgtgggacttgcaagtggagatttcagccgctttgaggtcaataatagaaaaggaaatatcttcgtagaaaaactagacagaatgattctcagaaacttcattgtgacgtgtgcgttcaactcacagagtttaacatttcttttcatagagcagttaggaaacactctgtttgtaaagtctgcaagtggatattcagacctctttgaggccttcgttggaaacgggattttcttcatactgtgctagacagaagaattctcagtaacttccttgtgttgtgtgtattccactgacagagttgaactttcatttagagagagcagatttgaaacactgtttttgtggaatttgcaagtggagatatcaagcgctttggggccaaaggcagaaaaggaaatatcttcgtataaaaactagacagaatcattctcagaaactgctgtgtgatgtgtgcgttcaactctcagagtttaacttttcttttcattcagcggtttggaaacactctgtttgtaaagtctgcacgtggatattttgaccacttagaggccttcgttggaaacgggattttttcatgtaaggctagacagaagaattcccagtaacttccttgtgttgtgtacattcaactcacagagttgaacgttcccttagacagagcagatttgaaacactctttttgtgcaattggcaagtggagatttcaagcgctttaaggtcaatggcagaaaaggaaatatcttcgtttcaaaactagacagaatcattcccacaaactgcgttgtgatgtgttcgttcaactcacagagtttaacctttctgttcatagagcagttaggaaacactctgtttgtaaagtctgaaagtggatattctgacatcttgtggccttcgttggaaacgggatttcttcatattctgctagacagaagaattctcagtaacttccttgtgttgtgtgtattcaactcacagagttgaacgatcctttacacagagcagactagaaacactctttttgtggaatttgcaagtggagatttcagccgctttgaggtcaatagtagaaaaggaaatatcttcgtagaaaaactagacagaatgattctcagaaactcctttgtgatgtgtgtgttcaactcacagaatttaacctttcttttcatagagcagttagtaaacactctgtttataaagtctgcaagtggatattcagacccctttgaagccttcgttggaaacgggatttcttcatattatgctagacagaagaattctcagtaacttcccttgtgttgtgtgtattcaactgacagagttgaactttcatttagagagagcagatttgaaacactgtttttgtggaatttgcaagtggaaatttcaagcgctttggggtcaaaggcagaaaaggaaatatcttcgtataaaaactagacagaatcattctcagaaactgctctgcgatgtgtgcgttcaactctcagagtttaacttttcttttcattcagcagtttggaaacactctgtttgtaaagtctgcaggtggatattttgaccacttagaggccttcgttggaaacgggtattttttcctgtaaggctagaaagaataattcccagtaacttccttgtgttgtgtgcattcaactcacagagttgaacgttcccttagacagagcagatttgaaacactctatttgtgcaatttgcaagtgtagatttcaagcgctttaaggtcaatggcagaaaaggaaatatcttcgtttcaaaactagacagaatcattcccacaaactgcgttgtgatgtgttcgttcaactcacagagtttaacctttctgttcatagagcagttaggaaacactctgtttgtaaagtctgaaagtggatattctgacatcttgtggccttcgttggaaacgggatttcttcatattctgctagacagaagaattctcagtaacttccttgtgttgtgtgtattcaactcacagagttgaacgatcctttacacagagcagacttcaaacattctttttgtggaatttgcaagtggagatttcagccgctttgaggtcaatggtagaaaaggaaactatcttcatataaagactagacagaatgattctcagaaactcctttgtgatgtgtgcgttcaactcacagagtttaacctttcttttcatagagcagttaggaaacactctgtttgtaaagtctggaagtggatattcagacctccttgaggccttcgttggaaacgggatttcttcatattatgcttgacagaagaattcccagtaacttccttgtgttgtgtgtgttcaactcacagagttgaactttcatttacacagagcagatttgaaacactctttttgtggaatttgcaaatggagatttcaagcgctttgaggccaaaggcagaaaaggaaatatcttcgtttcaaaactagacagaatcattctcagaaactgctctgcgatgtgtgcgttcaactctcagagtttaacttttctttccattctgcagtttggaaacactctggttgtaaagtctgcacgtggataacttgaccacttagaggccttcgttggaaacgggtttttttcctgtaaggctagacagaagaattcccagtaacttccttgtgttgtgtgcattcaactcacagagttgaacgttcccttagacagagcagatttggaacactctatttgtgcaatttgcaagtgtagatttcaagcgctttatggtcaacggcagaaaaggaaatatcttcgtttcaaaactagacagaatcactcccacaaactgcgttgtgatgtgttcgttcaactcacagagtttaacctttctgttcatagagcagttaggaaacactctgtttgtaaagtctgcaagtgaatattcagacctccttgaggccttcgttggaaacgggatttcttcatattctgctagaccgaataattctcagtaacttccttgtgttgtgtgtattcaactcacagagttgaacgatcctttacacagagcagatttgaaacactctttttgtggaatttgcaagtggagatttcagccgctttgaggtcaatggtagaaaaggaaactaccttcatataaagactagacagaatgattctcagaaactcctttgtgatgtgtgtgttcaactcacagagtttaacctttcttttcatagagcagttagtaaacactctgtttataaagtctgcacgtggatattttgaccacttagaggccttcgttggaaacgggtttttttcatgtaaggctagacagaagaattcccagtaacttccttgtgttgtgtgtgttcgactcacagagttgaactttcatttacacagagcagatatgaaacactctttttgtggaatttgcaagtggagatttcaagcgctttgaggccaaaggcagaaaaggaaatatcttcgtttcaaaactagacagaatcattctcagaaactgctgtgtgatgtgtgcgttcaactctcaaagtttaacttttcttttcattcagcggtttggaaacactctgtttgtaaagtctgcacgtggatattttgaccacttagaggccttcgttggaaacgggattttttcatgtaaggctagacagaagaattcccagtaacttccttgtgttgtgtgcattcaactcacagagttgaacgttcccttagacagagcagatttgaaacactctatttgtgcaatttgcaagtgtagatttcaagcgctttaaggtcaatggcagaaaaggaaatatcttcgtttcaaaactagacagaatcattcccacaaactgcgttgtgatgtgttcgttcaactcacagagtttaacctttctgttcatagagcagttaggaaacactgtgtttgtaaagtctgtaagtggatattctgacatcttgtggccttcgttggaaaagggatttcttcatattctgctagacagaagaattctcagtaacttccttgtgttgtgtgtattcaactcacagagttgaacgatcctttacagagagcagactttaaggactctttttgtggaatttgcaagtggagatttcagccgctttgaggtcaatggtagaaaaggaaatatcttcgtataaagactagacagaatgattctcagaaactcctttgtgatgtgtgtgttcaactcacagagtttaacatttcttttcatagagcagttaggaaacactctgtttgtaaagtctccaagtggatattcagacctctttgaggccttcgttggaaacgggtttttttcatataaggctagacagaagaattcccagtaacttccttgtgttgtgtgtgttcaactcacagagttgaactttcatttacacagagcagatttgaaacactctttttgtggaatttgcaagtggagatttcaagcgctttgaggccaaaggcagaaaaggaaatatcttcgtttcgaaactagacagaatcattctcagaaactgctctgcgatgtgtgcgttcaactctcagagtttaacttttcttttcattcagcagtttggaaacactctgtttgtaaagtctgcacgtggatattttgaccacttagaggccttcgttggaaacgggtttttttcctgtaagggtagacagaagaattcccagtaacttccttgtgttgtgtgcattcaactcacagagttgaacgttcccttagacagagcagatttgaaacactctatttgtgtaatttgcaagtgtacatttcaagcgctttaaggtcaacggcagaaaaggaaatatcttcgtttcaaaactagacagaatcattcccacaaactgcgttgtgatgtgttcgttcaactcacagagtttaacttttccgttcatagagcagttaggaaacactctgtttgtaaagtctgcaagtggatattcagacctccttgaggccttcgttggaaatgggatttcttcatattctgctagacagaagaattctcagtaacttcccttgtgttgtgtgtattcaactcacacagttgaacgatcctttacacagagcagacttgtaacactctttttgtggaatttgcaagtggagatttcagccgctttgaagtcaaaggtagaaaaggaaatatcttcctataaaaactagacagaatgattctcagaaactcctttgtgatgtgtgcgttcaactcacagagtttaacctttcttttcatagagcagttaggaaacactctgtttgtaaagtctgcaagtggatattcagacctcctttaggacttcgttggaaacgggatttcttcatattatgctagacagaaagaattcccagtaacttccttgtgttgtgtgtgttcaactcacagagttgaactttcatttacacagagcagatttgaaacactctttttgtggaatttgcaagtggagatttcaagcgctttgaggccaaaggcagaaaaggaaatatcttcgtttcaaaactagacagaatcattctcagaaactgctgcgtgatgtgtgcgttcaactctcagagtttaacttttcttttcattcagcggtttggaaacactctgtttgtaaagactgcacgtggatattttgaccacttagaggccttcgttggaaacgggttttttttcatgtaaggctagacagaagaattcccagtaacttccttgtgttgtgtgcattcaactcacagagttgaacgttcccttagacagagcagatttgaaacactctatttgtgcaatttgcaagtgtagatttcaagcgctttaaggtcagtggcagaaaaggaaatatcttcgtttcaaaactagacagagtgattctcagaaactcctttgggatgtctgcgttcaactcacagagtttaacctttcttttcatagagcagttaggaaacactctgtttgtaaagtctgcaagtgcatattcagacctccttgaggccttcgttggaaacgggatttcttcatattctgctatacagaagaattctcagaaacttccttgtgttgtgtgtattcaactcacagagttgaacgatcgtttacacagagcagacttgagaaactctttttgtggaatttgcaagtggagatttcagccgctttgaggtcaatggtagaaaaggaaatatcttcatataaaaactagacagaatgattctcataaactcctttgtgatgtgtgcgttcaactcacagagtttaacttttcttttcatagagcagttaggaaacactctgtttgtaaagtctgcaagtggatattcagacctctttggggccttcgttggaaacgggatttcttcatattctgctagacagaataattctcagtaacttccttgtgttgtgtgtattcaactcacagagttgaacgatcctttacagagagcagacttgaaacactctttttgtggaatttgcaagtggaaattgcagccgctttgaggtcaatggtagaaaaggaaatatcttcctatagaaactagacagaatcattctcagaaactgctgcgtgatgtgtgcgttcaactctcagagtttaacttttcttttcattcagcggtttggaaacactctgtttgtaaagtctgcacgtggaaattttgaccacttagaggccttcgttggaatcgggtttttttcatgtaaggctagacagaagaattcccagtaacttccttgtgttgtgtgcattcaactcacagagttgaacgttcccttagacagagcagatttgaaacactctatttgtgcaatttgcaagtgtagatttcaagcgctttaaggtcaatggcagaaaaggaaataacttcgtttcaaaactagacagaatcattcccacaaactgccttgtgatgtgttcgttcaactcacagagtttaacctttctattcatagagcagttaggaaacactctgtaacgtctgtaagtggatattctgacatcttgtggccttcgttggaaacgggatttcttcatattctgctagacagaagaattctcagtaacttccttgtgttgtgtgtattcaactcacagagttgaaggatcctttacagagagcaggcttcaaacactctttttgtcgaatttgcaagtggagatttcagccgctttgaggtcaatggtagaataggaaatatcttcgtataaagaatagacagaatgattctcagaaactcctttgtgatgtgtgcgttcaactcacagagtttaacctttcttttcatagagcagttaggaaacactctgtttgtaaagtctgcaagtggatattcagacctctttgaggccttcgttggaaacgggtttttttcatataaggcgagacagaagaattctcagtaacttccttgtgttgtgtgtattcaactgacagagttgaactttcatttagagagagcagatttgaaacactctttttgtggaatttgcaagtggagatttcaagcgctttggggccaagggcagaaaaggaaatatcttcgtataaaaactagacagaatcattctcagaaactgctgcgtgatgtgtgcgttcaactctcagagtttaacttttcttttcattcagcggtttggaaacactctgtttgtaaagtctgcacgtggatattttgaccacttagaggcttcgttggaaacgggtttttttcatgtaaggctagacagaagaattcccagtaacttccttgtgttgtgtacattcaactcacagagttgaacgttcccttagacagagcagatttgaaacactctttttgtgcaattggcaaatggagatttcaagcgctttaaggtcaatggcagaaaaggaaatatcttcctttcaaaactagacagaatcattcccacaagctgcgttgtgatgtgttcgttcaactcacagagtttaacctttctgttcatagagcagttaggaaaccctctgtttgtaaagtctgcaagtggatattcagacctctttgaggctttcgttggaaacgggatttcctcatattctgctagacagaagaattctcagtaacttccttgtattgtgtgtattcaactcacagagttgaacgatcctttacacagagcagacttgaaacactctttttgtggaatttgcaagtggagatttcagccgctttgtgatcaatggtagaataggaaatatcttcctatagaaactagacagaatgattctcataaactcctttgtgatgtgtgcgttcaactcacagagtttaacttttcttttcatagagcagttaggaaacactctgtttgtaaagtctgcaagtggatattcagacctccttgaggccttcgttggaaacgggatttcttcatattatgctagacagaagaattcccagtaacttccttgtgttgtgtgtgttcaactcacagagttgaactttcatttacacagagcagatttgaaacactctttttgtggaatttgcaagtggagatttcacgcgctttgaggccaaaggcagaaaaggaaatatcttcgtttgaaaactagacagaatcattctcagaaactgctctgcattgtgtgcgttcaactctcagagtttaacttttcttttcattcagcagtttgaaaacactctgtttgtaaagtctgtacgtggataatttgaccacatagaggccttcgttggaaacgggtttttttcatgtaaggctagacagaagaattcccagtaacttccttgtgttgtggacattcaactcacaaagttgaacgttcccttagacagagcagacttgtaacactctttttgtggaatttgcaagtggagttttcagccgcttttaagtcaatggtagaaaaggtaatatcttccaataaaaactagacagaatcattcccacaaactgcgttgtgatgtgttcgttcaactcacagagtttaacctttctgttcatagagcagttaggaaacactctgtttgtaaagtctgcaagtggatattcagacctctttgaagccttcgttggaaacgggatttcttcatattctgctagacagaagaattctcagtaacttccttgtgttgtgtgtattcaactcacagagttgaacgatcctttacacagagcagacttgaaacactttttttgtggaatttgcaagtggaggtttcagccgctttgaggtcaatagtagaaaaggaaatatcttcgtagaaaaagtagacagaatgattctcagaaactcctttgtgatgtgtgcgttcaactcacagagtttaacctttcttttcatagagcagttaggaaacactctgtttgtaaagtctgcaagtggatattcagacctccttgaggccttcgttggaaacggtatttcttcatattctgctagacagaagaattcccagtaactttccttgtgttgtgtgtgttcaactcacagagttgaactttcatttacacagagcagatttgaaacactctttttgtggaatttgcaagtggagatttcaagcgctttgaggccaaaggcagaaaaggaaatagtcttcgtttcaaaactagacagaatcactctcagaaactgctctgcgatgtgtgcgttcaactctcagagtttaacttttcttttcattcagcagtttggaaacactctgtttgtaaagtctgcacgtggatattttgaccactcagaggccttcgttggaaacgggtttttttcctgtaaggctagacagaagaattcccagtaacttccttgtgttgtgtacattcaactcacagagttgaacgttcccttagacagagcagatttgaaacactctttttgtgcaattggcaagtggagatttcaagagatttaaggtcaatggcagaaaaggaaatatcttcgtttcaaaactagacagaatcattcccacaaactgcgttgtgatgtgttcgttcaactcacagagtttaacctttctgttcatagagcagttaggaaacactctgtttgtaaagtctgtaagtggatattctgacatcttgtggccttcgttggaaaggggatttcttcatattccgctagacagaagaattctcagtaacttccttgtgttgtgtgtattcaactcacagtagttgaacgaccctttacacagagcagacttgtaacactctttttgtggaatttgcaagtggagatttcagccactttgaagtcaaaggtagaaaaggaaataacttcctataaaaactagacagaatgattctcagaaactcctttgtgatgtctgcgttcaactcacagagtttaacctttcttttcatagagcagttaggaaacactctgtttgtaaagtctgcaagtggatattcagacctccttgaggccttcgttggaaacgggatttcttcatattctgctatacagaagaattcccagtaacttccttgtgttgtgtgtgttcaactcacagagttgaactttcatttacacagagcagatttgaaacactctttttgtggaatttgcaagtggagatttcaagcgctttgaggccaaaggcagaaaaggaaatatcttcgtatataaactagacagaatcattctcagaaactgctctgtgatgtgtgcgttcaactctcagagtttaacttttcttttcattcagcagtttggaaacactctgtttgtaaagtctgcacgtggataatttgatcacttagaggccttcgttggaaacgggtttttttcatgtaaggctagacagaagaattcccagtaacttccttgtgttgtgtgcattcaactcacagagttgaacgttcccttagacagagcagatttgaaacactctatttgtgcaatttgcaagtgtagatttcaagcgcattaaggtcaatggcagaaaaggaaatatcttcgtttcaaaattagacagaatcattcccacaaactgcgttgtgatgtgttcgttcaactcacagagtttaacctttctgttcatagagcagttaagaaacactctgtttgtaaagtctgcaagtggatattcagacctccttgaggccttcgttggaaacgggatttcttcatattctgctagacagaagaattctcagaaacttccttgtgttgtgtgttttcaactcacagagttgaacgatcctttacacagagcagacttgaaacactccttttgtggaatttgcaagtggagatttcagccgctttgaggtcaatgatagaataggaaatatcttcctatagaaagtagacagagaacgattctcagaaactcctttgtgatgtgtgcgttgaactcacagagtttaacctttcttttcatagagcagttaggaaacactctgtttgtaaagtctgcaagtggatattcagacctctttgaggccttcgttggaaacgggatttcttcatattctgctagacagaagaatccccagtaacttccttgtgttgtgtgtgttcaactcacagagttgaactttgatttacacagagcagatttgaaacactctttttgtggaatttgcaagtggagatttcaagcgctttgaggccaaaggcagaaaaggaaatatcttcgtataaaaactagacagaatcatgctcagaaactgctctgcgatgtgtgcgttcaactctcagagtttaacttttcttttcattcagcagtttggaaacactctgtttgtaaagtctgcacgtggataacttgaccacttagaggccttcgttggaaacgggtttttttcatgtaaggctagacagaagaattcccagtaacttccttgtgttgtgtgcattcaactcatagagttgaacgttcccttagacagagcagatttgaaacactctatttgtgcaatttgcaagtgtagttttcaagctctttaaggtcaacggcagaaaaggaaatatcttggtttcaaaactagacagaatcattcccacaaactgcgttgtgatgtgttcgttcaactcacagagtttaacctttcttttcatagaacagttaggaaacagtctgtttgtaaattctgtaagtggatattctgacatcttgtgaccttcgttggaaacgggatttcttcatattctgctagacagaagaattctcagaatcttccttgtgttgtgtgtattcaacccacagtagttgaacgatagtttacacagagcagatttgaaacactcatttggtggaatttgcaagtggagatttcagccgctttgaggtcaatggtagaaaaggaaatatcttcgtataacaactagacagaatgattctcagaaacttctttgtgatgtgtgtgttcaactcacagagtttaacctttcttttcatagagcagttaggaaacactgtgtttttaaactctgcaagtggatattcagacctctttgaggccttcgttggaaacgggtttcttcatactgtgctagacagaagaattcccagtaacttccttgtgttgtgtgtgttcaactcacagagttgaactttcatttacacagagcagatttgaaacactctttttgtggaatttgcaagtggagatttcaagagctttgaggccaaaggcagaaaaggaaatatcttcgtataaaaactagacagaatgattctcagaaactgctctgcgatgtgtgcgttcaactcccagagtttaacttttcttttcattcagcagtttggaaacactctgtttgtaaagtctgcacgtggataacttgaccacttagaggccttcgttggaaacgggtttttttcatgtaaggctagacagaagaattcccagtaacttccttgtgttgggtgcattcaactcacagagttgaacgttcccttagacagagcagatttgaaacagcctatttgtgcaatttgcaagtgtagatttcaagcgctttaaggtcaacggcaggaaaggaaatatcttcctttcaaaactagacagaatcattctcagaaactgctctgcgatgtgtgcgttcaactctcagagtttaactttgcttttcattcagcagtttggaaacactctgtttctaaagtctgcacgtggataatttgaccacttagaggccttcgttggaaacgggtttttttcatgtaaggctagacagaagaattctcagtaacttccttgtgttgtgtgtattcaactcacagagttgaacgatcctttacacagagcagacttgtaacactctttttgtggaatttgcaagtggagatttcagccgctttgaagtcaaaggtagaaaaggaaatatcttcctataaaaactacacagaatgattctcagaaactcctttgtgatgtgtgcgttcaactcacagagtttaaccttccttttcatagtgcagttaggaaacactctgtttgtaaagtctgcaagtggatattcagacctctttgaggccttcgttggaaacgggtttttttcatataaggctagacagaagaattcccagtaacttccttgtgttgtgtgtgttcaactcacagagttgaactttcatttacacagagcagatttgaaacactctttttctggaatttgcaaatggagatttcaagggatttgaggccaaaggcagaaatggaaatatcttcgtataaaaactagacagaatcattctcagaaactgctgcgtgatgtgtgcgttcaactctcagagtttaacttttcttttcattcagcggtttggaaacactctgtttgtaaagtctgcacgtggacattttgaccacttagaggccttcgttggaaacgggtttttttcatgtaaggctagacagaagaattcccagtaacttgccttgtgttgtgtacattcaactcacagagttgaacgttcccttagacagagcagatttgaaacactctttttgtgcaattggcaaatggagatttcaagcgctttaaggtcaatggcagaaaaggaaattgttcgtttcaaaactagacagaatgattctcagaaactcctttgtgatgtgtgcgttcaactcacagagtttaacctttctgttcatagagcagttaggaaacactctgtttgtaaagtctgcaagtggatattcagaccaccttgaggccttcggtggaaacgggatttcttcatattctgctagacagaagaattctcagtaacttccttgtgttgtgtgtattcaactcacagagttgaacgatcctttacacagagcagagttgaaacactctttttgtggaatttgcaagtggagatttcagccgctttgaggtcaatggtagaaaaggaaatatcttcgtataaagactagacagagtgtttctcagaaactcctttgtgatgtctgcgttcaactcacagagtttaacctttcttttcatagagcagttaggaaacactctgtttgtaaagtctgcaagtggatattcagacctccttgaggccttcgttggaaacgggatttcttcatattctgctatacagaagaattctcagaaacttccttctattgtgtgtattcaactcacagagttgaacgatcgtttacacagagcagactagagacactctttttgtggaatttgtaagtggagatttcagccgctttgaggtcaatggtagaaaaggaaatatcttcgtataaaaactagacagaatcattctcagaaactgctctgcgatgtgtgcgttcaactctcagagtttaacttttcttttcattcagcagtttggaaacactctgtttgtaaagtctgcacgtggataacttgaccacttagaggccttcgttggaaacgggtttttttcatgtaacgctagacagaagaattcccagtaacttccttgtgttgtgtacattcaactcacagagttgaacgttcccttagacagagcagatttgaaacactctttttgtgcaattggcaaatggagatttcaagcgctttaaggtcaatggcagaaaaggaaatatcttcgtttcaaaactagacagaatcattcccacaaactgcgttgtgatgtgttcgttcaactcacagagtttaacctttcttttcatagagcagttaggaaacagtctgtttgaaaattctgtaagtggatattctgacatccttgtggccttcgttggaaacgggatttcttcatattctgctagacagaagaattctcagtaacttccttgtgttgtgtgtattcaactcacagagttgaacgatcctttacacagagcatacttgaaacactcttgttgtggaatttgcaagtggagatttcagccgctttgaggtcaatggtagaataggaaacatcttcctatagaaactagacagaatgattctcagaaactcccttgtgatgtgtgcgttcaactcacagagtttaacctttcttttcatagagcagttaggaaacactctgtttgtaaagtctgcaagtggatattcagacctctttgaggccttcgttggaaacgggatttcttcatattatgctagacagaagaattctcagtaacttccttgtgttgtgtgttttcaactcacagagttcaacgatcctttacatagagtagacttgaaacactctttttgtggaattggcaagtggagatttcagccgctttgaggtcaatggtagaaaaggaaatatcttcgtataaaaaatagacagaaatgattctcagaaactcctttgtgatgtctgcgttcaactcacagagtttaacctttcttttcatagagcagttaggaaacactctgtttgtaaagtctgcaagtggatattcagacatccttgaggccttcgttggaaacgggatttcttcatgttctgctagacagaagaattcccagtaacttccttgtgttgtgtgtgttcaactcacagagatgaactctcatttacacagagcagatttgaaacactctttttgtggaatttgcaaatggagatttcaagcgctttgaggccaaaggcagaagaggaaatatcttcgtataaaaactagacagaatcattctcagaaacagctctgcgatgtgtgcgttcaactctcagagtttaacttttcttttcattcagcagtttggaaacactctgtttgtaaagtctgcacgtacataatttcaccacttagaggccttcgttggaaacaggtttttttcatgtaaggctagacagaagaattctcagtaacttccttgtgttgtgtgtattcaactcacagagttgaacgatcctttacacagagcagacttgaaacactctatttgtagaatttgcaagtggagatttcagctgctttgaggtcaatagtagaaaaggaaatatcttcgtagaaaaactagacagaaagattctcagaaactcctttgtgatgtgtgcgttcaactcacagagtttaacctttcttttcatagagcagttaggaaacactctgtttgtaaagtctgcaagtggatattaagacctccttgaggccttcgttggaaacgggatttcttcatattctgctagacagaagaattctcagtaacttccttgtgttctgtgtattcaactgacagagttgaactttcatttagagagagcagatttgaaacactgtttttgtggaatttgcaagtggagatttcaagcgctttggggccaaaggcaaaaaaggaaatatcttcgtataaaaactagacagaatgattctcagaaactcctttgtgatgtgtgcgttcaactcacagagtttaacctttcttttcatagagcagttaggaaacactctgtttgtaaagtctgcacgtggatattttgaccacttagaggccttcgttggaaacgggtttttttcctgtaaggctagacagaagaattcccagtaacttccttgtgttgtgtacattcaactcacagagttgaacgttcccttagacagagcagatttgaaacactctttttgtgcaattggcaaatggagatttcaagcgctttaaggtcaatggcagaaaaggaaatatcttcgtttcaaaactagacagaatgattctcagaaactcttttgtgatgtgtgcgttcaactcacagagtttaacttttcttttcatagagcagttaggaaacactctgtttgtaaagtctgcaagtggatattcagacctccttgtggccttcgttggaaacgggatttcttcatattctgctagacggaagaaatctcagtaacttccttgtgttgtgtgtattcaactcacagagttgaacgatcctttacacagagcagacttgaaacactctttttgtggaatttgcaagtggagatttcagccgctttgaggtcaatggtagaataggaaatatcttcctatagaaactagacagaatgattctcataaactcctttgtgatgtgtgcgttcaactcacagagtttaacgtttcttttcatagagcagttaggaaaaactctgtttgtaaagtctgcaagtggatattcagacctctttgaggccttcgttggaaacgggatttcttcatattatgctagacagaacaattctcagtaacttccttgtgttgtgtgtattcaactcacagagttgaacgatcctttacacagagcagacttgaaacactctttttgtggaatttgcaagtggagatttcagccgctttgaggtcaatggtagaaaaggaaactatcttcgtataaagactagacagaatcattctcagaaactgctgcgtgatgtgtgcgttcaactctcagagtttaacttttcttttcattcagcggtttggaaacacgctgtttgtaaagtctgcacgtggaaattttgaccacttagaggccttcgttggaaacgggtttttttcatgtaaggctagacagaagaattcccagtaacttccttgtgttgtgtgcattcaactcacagagttgaacgttcccttagacagagcagatttgaaacactctatttgtccaatttgcaagtgtagatttcaagcgctttaaggtcaacggcagaaaaggaaatatcttcgtttcaaaactagacagaatcattcccacaaactgcgttgtgatgtgttcgttcaactcacagagtttaacctttctgttcatagagcagttaggaaacactctgtttgtacagtctgtaagtggatattctgacatcttgtggccttcgttggaaactggatttctccatattctactagacagaagaattctcacaatcttccttgtgttgtgtgtattcaactcacagagttgaacgatggtttacacagagaagatttgaaacactctttttgtggaatttgcaagtggagatttcacccgctttgaggtcaatggtagaaaaggaaatatcttcgtataaaaactagacagaatgattctcagaaactcctttgtgatgtgtgcgttcaactcacagagattaacctttcttttcatagagcagttaggaaacactctgtttgtaaagtctgcaagtggatattcagacctctttgaggccttcgttggaaacgggatttcttcatattctgctagacagaagaattcccagtaacttccttgtgttgtgtgtgttcaactcacagagttgaactttcatttacacagagcagatttgaaacactctttttgtggaatttgcaactggagatgtcaagcgctttgaggccaaaggcagaaaaggaaatatcttcgtttcaaaactagacagaatcattctcagaaaatgctctgtgatgtgtgcgttcaactctcagagtttaacttttcttttcattcagcagtttggaaacactctgtttgtaaagtctgcacgtggatattttgaccacttagaggccttcgttggaaacgggtttttttcatgtaagggtagacagaagaattcccagtaacttccttgtgttgtgtgcattcaactcacagagttgaacgttcccttagacacagcagatttggaacactctatttgtgcaatttgcaagtgtagatttcaagcgctttaaggttaacggcagaaaaggaaatatcttcgtttcaaaactagacagaatgattctcagaacctcctttgtgatgtgtgcgttcaactcacagagttgaacctttcttttcatagagcagttaggaaacacactgtttgtaaagtctgcaagtggatattcagacatccttgaggctttcgttggaaacgggatttcttcatattctgctagaaagaagaattctcagtaacttccttgtgttgtgtgtattcaactcacagagttgaacgatcctttacacagagcagacttgaaacactctttttgtggaatttgcaagtggagatttcagccgctttgaggtcaatggaagaataggaaatatcttcctatagaaactagacagaatgattctcagaaactcctttgtgatgtgtgtgttcaactcacagagtttaacctttcttttcatagagcagttagtaaacactctgtttataaagtctgcaagtggatattcagacccctttgaggccttcgttggaaacgggatttcttcatattctgctagacagaagaattctcagtaacttccttgtgttgtgtgtattcaactcacagagttgaaggatcctttacagagagcagccttgaaacactctttttgtcgaatttgcaagtggagatttcagccgctttgaggtcaatggtagaataggaaatatcttattatagaaactagacagaatcattctcagaatctgctgcgtgatgtgtgcgttcaactctcagagtttaacttttcttttcattcagcggtttggaaacactctgtttgtaaagtctgcacgtggatattttgaccacttagaagccttctttggaaacgggttttcttcatgtaaggctagacagaagaattcccagtaacttccttgtgttgtgtgcattcaactcacagagttgaacgttcacttagacagagcagatttgaaacactctatttgtgcaatttgcaagtgtagatttcaagcgctttaaggtcaatggcagaaaaggaaatttcttcgtttcaaaactagacagaaatcattctcagaaactgctctgcgatgtgtgcgttcaactctcagagtttaactttgcttttcattcagcagtttggaaacactctgtttgtaaagtctgcacgtggataatttgaccacttagaggccttcgttggaaacgggtttttttcatgtaaggctagacagaagaattctcagtaacttccttgtgttgtgtgtattcaactcacagagttgaacgatcctttacacagagcagacttggaacactctttttgtggaatttgcaagtggagatttcagccgctttgaagtcaaaggtagaaaaggaaatatcttcctataaaaactagacagaatgattctgagaaactcctttgtgatgtgtgcgttcaactcacagagtttatcctttcttttcatagagcagttaggaaacactctgtttgtgaagtctgcaagtggatattcagacctctttgaggccttcgttggaaacgggatttcttcatattctgctagacagaagaattcccagtaacttccttgtgttgtgtgtgttcaactcacagagttgaactttcatttacacagagcagatttgaaacactctttttgtggaatttgcaattggagatttcaagcgctttgaggccaaaggcagaaaaggaaatatcttcggtataaaaactagacagaatcattctcagaaactgctctgcgatgtgtgcgttcaactctcagagtttaactttgcttttcattcagcagtttggaaacactctgtttgtaaagtcttcacgtggatattttgaccacttagaggccttcgttggaaacgggtttctttcctgtaaggctagacagaagaattcccagtaacttccttgtgttgtgtacggttcaactcacagagttgaacgttcccttagacagagcagatttgaaacactctttttgtgcaattggcaagtggagatttcaagcgctttaaggtcaatggcagaaaaggaaatatcttcgtttcaaaactagacagaatcattcccacaaactgcgttgtgatgtgttcgttcaactcacagactttaacctttcttttcatagagcagttaggaaacagtctgtttgtaaattctgtaagtggatattctgacatacttgtggccttcgttggaaacgggatttcttcatattctgctagacagaagaattctcagtaacttccttgtgttgtgtgtattcaactcacagagttgaacgatcctttacacagagcagacttgaaacactctttttgtggaatttgcaagtggagatttcagccgctttgaggtcaatggtagaataggaaatatcatcctatagaaactagacagaatgattctcagaaactcctttgtgatgtgggcgttcaactcacagagtttaaccattcttttcatagagcagttaggaaacactctgtttgtaaagtatgcatgtggatatttggacttctttgaggccttcgttggaaacgggtttttttcatgtaaggctagacagaagaattctcagtaacttccttgtgttgtgtgtattcaactcacagagttgaacgatcctatacacagagcagacttgaaacactctttttgtggaatttgcaagtggagatttcagccgctttgaggtcaatggtagaataggaaatatcttcctatagaaactagacagaatcattctcagaaactgctgcgtgatgtgtgcgttcaactctcagagtttaacttttcttttcattcagcggtttggaaacactctttttgtaagtctgcacgtggatattttgaccacttagaggccttcgttggaaacgggtttttttcatgtaaggctagacagaagaattcccagtaacttccttgtgttgtgtacattcaactcacagagttgaacgttcccttagacagagcagatttgaaacactctttttgtgcaattggcaaatggagatttcaagcgctttaagttcaatggcagaaaaggaaatatcttcgtttcaaaactagacagaatcattcccacaaactgcgttgtgatgtgttcgttcaactcacagagtttaacctttctgttcatagagcagttaggaaacactctgtttgtaaagtctgaaagtggatattctgacatcttgtggccttcgttggaaacgggatttcttcatattctgctagacagaagaattgtcagtaacttccttgtgttgtgtgtattcaactcacagagttgaacgatcctttacacagagcagacttgaaacactctttttgtggaatttgcaagtggagatttcagccgctttgagttcaatggtagaataggaaatatcttcctatagaaactagacagaacgattctcaaaaactcctttgtgatgtgtgcgttcaactcacagagtttaacctttcttttcatagagcagttaggaaacactctgtttataaagtctgcaagtggatattcagacccctttgaggccttcgttggaaacgggatttcttcatattatgctagacagaagaattctcagtaacttccttgtgttgtgtgtattcaactgacagagttgaactttcatttagagagagcagatttgaaacactgtttttgtggaatttgcaagtggagatttcaagcgccttggggccaaaggcagaaaaggaaatatcttcgtataaaaactagacagaatcattctcagaaactgctctgcgatgtgtgcgttcaactctcagagtttaacttttcttttcattcagcagtttggaaacactctgtttgtaaagtctgcacgtggataatttgaccacttagagaccttcgttggaaacgggtttttttcatggaaggctagacagaagaattcccagtaacttccttgtgttgtgtacattcaactcacagagttgaaagttcccttagacagagcagatttgaaacactctttttgtgcaattggcaaatggagatttcaagcgctttaatgtcaatggcagaaaaggaaatatcttcgtttcaaaactagacagaatcattcccacaaactgcgttgtgatgtgttcgttcaactcacagagtttaacctttcttttcatagagcagttaggaaacagtctgtttgtaaattctgtaagtggatattctgacattttgtggccttcgttggaaacgggatttcttcatattctgctagacagaagaattctcagtaacttccttgtgttgtgtgtattcaactcacagagttgaacgatcctttacacagagcagacttgtaacactctttttgtggaatttgcaagtggagatttcagccgctttgaggtcaacggtagaaaaggaaatctcttcgtataaaaactagacagaatgattctcagaaacttctttgtgatgtgtgtgttcaactcacagagtttaacctttcttttcatagagcagttaggaaacactctgcctgtaaagtctgcaagtggatattcagacctcgttgaggccttcgttggaaacgggatttcttcatattctgctagacagaagaattctcagtaacttccttgtgttgtgtgtattcaactgacagagttgaactttcatttagagagagcagatttgaaacactgtttttgtggaatttgcaagtggagatttcaagcgctttggggccaaaggcagaaaaggatatatcttcgtataaaaactagacagaatcattctcagaaactgctgcgtgatgtgtgcgttcaactctcagagtttaaagtttcttttcattcagcggtttggaaacactctgtttgtaaagtctgcaagtggatattcagacctcttggaggctttcgttggaaacgggatttcttcatattctgctagacagaagtaattcccagtaacttccttgtgttgtgtgcattcaactcacagagttgaacgttcccttagacagagcagatttgaaacactctatttgtgcaatttgcaagtgtagatttcaagcgctttaaggtcaatggcagaaaaggaaatatcttcgtttcaaaactagacagaatcattcccacaaactgcgttgtgatgtgttcgttgaactcacagagtttaacctttcttttcatagagcagttaggaaacagtctgtttgtcaattctgtaagtggatattctgacatcttgtggccttcgttggaaacgggatttcttcatattctgctagacagaagaattctcagtaacttccttgtgttgtgtgtattcaactcacagagttgaacgatcttttacacagagcagacttgaaacactctttttgtggaatttgcaagtggagatttcagccgctttgaggtcaatggtagaaaaggaaatatcttcgtataaagactagacagaatgattcttagaaactcctttgtgatgtgtgcgttcaactcacagagtttaacctttctgttcatagagcagttaggaaacactctgtttgtaaagtctgcaagtggatattcagacctcctttaggccttcgttggaaacgggatttcttcatattctgctagacagaagaattctcagtaacttccttgtgttgtgtgtattcaactcacagagttgaactatcctttacacagagcagacttgaaacactctttttgtggaatttgcaagtggagatttcagccgctttgaggtcaatggtagaaaaggaaatatcttcgtataaaaactagacagaatcattctcagaaactgctctgtgatgtgtgcgttcaactctcagagtttaccttttcttttcattcagcagtttggaaacactctgtttgtaaagtctgcacgtggataatttgaccacttagaggccttcgttggaaacgggtttttttcatgtaaggctagacagaagaattcccagtaacttccttgtgttgtgtgcattcaactcacagagttgaacgttcccttagacagagcagatttgaaacactctatttgtgcaatttgcaagtgtagatatcaagcgctttaaggtcaatggcagaaaaggaaatgtcttagtttcaaaactagacagaatgattctcagaaacttctttgtgatgtgtgcgttcaactcacagagtttaacctttcttttcatagagcagttaggaaacactctgtttgtaaactctgcaagtggatattcagacctcttggaggccttcgttggaaacgggatttcttcatagtatgctagacagaagaattctcagtaacttccttgtgttgtgtgtattcaactcacagagttgaaagatcctttacacagagcagacttgaaacactctttttgtggaatttgcaagtggagatttcagccgctttgaggtcaatagtagaaaaggaaatatcttcgtagaaaaactagacagaatgattctcagaaactcctttgtgatgtgtgcgttcaactcacacagtttaacctttcttttcatagagcagttgggaaacactctgtttgtaaagtctgcaagttgatattcagacctctttgaggccttcgtttgaaacgggatttcttcatattctgctagaaagaagaattctcagtaacttccttgtgttgtgtgtattcaactgacagagttcaactttcacttagagagagcagatttgtaacactgtttttgtggaatttgcaagtggagatttcaagcgctttggggccaaaggcagaaaacgaaatatcttcgtataaaaactagacagaatcattctcagaaaatcctctgtgatgtgtgggttcaactctcagagtttaacttttcttttcattcagcagtttggaaacactctgtttgtaaagtctgcacgtggatattttgaccacttagaggccttcgttggaaacgggtttttttcatgtaagggtagacagaagaattcccagtaacttccttgtgttgtgtgcattcaactcacagagttgaacgttcccttagacagagcagatttgaatcactctatttgtgcaatttgcaagtgtagatttcaagcgatttaaggtcaatggcagaaaaggaaatatcttcgtttcaaaactagacagaaatcattcccacaaactgcgttgtgatgtgttcgttcaactcacagagtttaacctttctgttcatagagcagttaggaaacactctgtttgtaaagtctgtaagtggatattctgacatcttgtggccttcgttggaaacgggatttcttcatattctgctagacagaagaattctcagtaacttccttgtgttgtgtgtattcaactcacagagttgaacgatcctttacacagagcagacttgaaacactcttcttgtggaatttgcaagtggagatttcagccgctttgaggtcaatggtagaaaagtaaatatcttcgtataaagactagacagaatgattctcagaaactcctttgtgatgtgtgcgttcaactcacagagtttaacctttcttttcatagagcagttaggaaacactctgcttgtaaagtctgcaagtggatattcagacctctttgaggccttcgttggaaacgggtttttttcatataaggctacacagaagaattcccagtaacttccttgtgttgtgtgtgttcaactcacagagttgaactttcatttacacagagcagatttgaaacactctttttgtggaatttgcaagtggagatttcaagggctttgaggccaaaggcagaaaaggaaatatcttcgtataaaaactagacagaatcattctcagaaactgctctgcgatgtgtgcgttcaactctcagagtttaacttttcttttcattcagcagtttggaaacactctgtttctaaagtctgcacgtggataatttgaccacttagaggccttcgttggaaacgggtttttttcctgtaaggctagacagaagaattcccagtaacttccttgtgttgtgtacattcaactcacagagttgaacgttcccttagacagagcagatttgaaacactctttttgtgcaattggcaagtggagatttcaagcgctttaaggtcaatggcagaaaaggaaatatcttcgtttcaaaactagacagaatcattcccacaaactgcgttgtgatgtgttcgttcaactcacagagtttaacctttctgttcatagagcagttaggaaacactctgtttgtaaagtctgcaagtggatattcagacctcctagaggccttcgttggaaacgggatttctccatattctgctagacagaagaattctcagtaacttccttgtgttgtgtgtattcaactcacagagttgaacgatcctttacaaagagcagacttgaaacattctttttgtggaatttgcaagtggagatttcagccgctttgaggtcaatggtagaataggaaatatgttcctatagaaactagacagaatgattctcagaaactccattgtgatgtgtgcgttcaactcaaagagtttaacttttcttttcatagagcagttaggaaacactctgtttgtaaagtctgcaagtggatattcagacccctttgaggccttcgttggaaacgggatttcttcatattatgctagacagaagaattcccagtaacttccttgtgttgtgtgtgttcaactcacagcagttgaactttcatttacacagagcagatttgaaacactctttttgtggaatttgcaagtggagatttcaagcgctgtgaggccaaaggcagaaaaggaaatatcttcgtataaaaactagacagaatcattctcagaaactgctctgcgatgtgtgcgttcaactctcagagtttaacttttcttttcattcagcagtgtggaaacactctgtttgtaaagtctgcacgtggatattttgaccacttataggccttcgttggaaacgggtttttttcctgtaaggctagacagaagaattcccagtaacttccttgtgttgtgtacattcaactcacagagttgaacgttcccttagacagagcagatttgaaacactctttttgtgcaattggcaaatggagatttcaagcgctttaaggtcaatggcagaaaaggaaatatcttcgtttcaaaactagacagaatcattcccacaaactgcgttgtgatgtgttcgttcaactcacagagtttaacctttctgttcatagagcagttaggaaacactctgtttgtaaagtctgtaagtggatattcagacatcttgtggccttcgttggaaacgggatttcttcatattctgctagacagaagaattctcagtaacttccttgtgttgtgtgtatgcaactcacagagttgaacgatcctttacacagagcagacttgaaacactctttttgtggaatttgcaattggagatttcagccgctttgaggtcaatggtagaaaaggaaactatcttcatataaagactagacagaatgattctcagaaactcctttgtgatgtgtgcgttcaactcacagagtttaacctttcttttcatagaccagttaggaaacactctgtaaagtctgcaagtggatattcagacatccttgaggccttcgttggaagcgggatttcttcatattctgctacaaagaagaattcttagtaacttccttgtgttgtgtgtattcaactcacagagttgaacgatcctttacacagagcagacttgaaacattctttttgtggaatttggaagtggagatttcagccgctttgaggtcaatggtagaataggaaatatcttcctatagaaactagacagaatcattctcagaaactgctgcgtgatgtgtgcgttcaactctcagagtttaacttttcttttcattcagcggtttggaaacactctgtttgtaaagtctgcacgtggatattttgaccacttagaggccttcgttggaaacgggtttttttcatgtaaggctcgacagaagaattcccagtaaattccttgtgttgtgtacattcaactcacagagttgaacgttcccttagacagagcagatttgaaacactctttttgtgcaattggcaagtggagatttcaagcgctttaaggtcaatggcagaaaaggaaatatcttcgtttcaaaactggacagaatcattcccacaaactgcgttgtgatgtgttcgttcaactcacagagtttaacctttcttttcatagagcagttaggaaagagtctgtttgtaaattctgtaagtggatattctgacatcttgtggccttcgttggaaacgggatttcttcatattctgctagacagaagaattctcagaaacttccttgtgttgtgtgttttcaactcacagagttgaacgatcctttacacagagcagacttgaaacactctttttgtggaatttgcaagtggagatttcagccgctttgaggtcaatggtagaataggaaatatcttcctatagaaactagacagaacgattctcagaaactcctttgtgatgtgtgcgttcaactcacagagtttaacctttcttttcatagagcagttaggaaacactctgtttgtaaagtctgcaagtggatattcagacctctttgaggccttcgttgtaacgggatttcttcctattctgctagacagaagaattcccagtaacttccatgtgttgtgtgtgttcaactcacagagttgaactttcatttacacagagcagatttgaaacactctttttgtggaatttgcaaatggagatttcaagcgctttgaggccagaggcagaaaaggaaatatcttcgtataaaaactagacagaatcattctcagaaactgctctgcgatgtgtgcgttcaactctcagagtttaacttttcttttcattcagcagtttggaaacactctgtttgtaaagtctgcatgtggataatttgaccacttagaggtcttcgttggaaacgggtttttttcatgtaaggctagacagaagaattcccagtaacttccttgtgttgtgtgcattcaactcacagagttgaacgttcccttagacagagcagatttgaaacactctatttgtgcaatttgcaagtgtagttttcaagctctttaaggtcaacggcagaaaaggaaatatcttggtttcaaaactagacagaatcattcccacaaactgcgttgtgatgtgttcgttcaactcacagagtttaacctttctgttcatagagcagttaggaaacactctgtttgtaaagtctgcaagtggatattcagacctccttgaggccttcggtggaaacgggatttcttcatattctgctagacagaagaattctcagtaacttccttgtgttgtgtgtattcaactcacagagttgaacgatcctttacacagaccagacttgaaacactctttttgtggaatttgcaagtggagatttcagccgctttgaggtcaatggtagaaaaggaaatatcttcgtataaagactagacagaatgattctcagaaactcctttgtgatgtgtgtgttcaactcacagagtttaacctttcttttcatagagcagttaggaaacactctgtttgtaaagtctgcaagtggatattcagacctctttgaggccttcgttggaaacagttttttttcatataaggctagacagaagaattcccagtaacttccttgtgttgtgtgtgttcaactcacagagttgaactttcatttacacagagcagattggaaacactctttttgtggaatttgcaagtggagatttcaagcgctttgaggccaaagacagaaaaggaaatatcttcgtataaaaactagacagaatcattctcagaaactgctctgcgatttgtgcgttcaactctcagagtttaactttgcttttcattcagcagtttggaaacactctgtttgtaaagtctgcacgtggatattttgaccacttagaggccttcgttggaaacgggtttctttcctgtaaggctagacagaagaattctcagtaacttccttgtgttgtgtgtattcaactcacagagttgaacgatcctttacagagagcagacttgaaacactctttttgtggaatttgcaagtggagatttcagccgctttgtggtcaatggtagaataggaaatatcttcctatagaaactagacagaatgattctcagaaactcctttgtgatgtgtgcgttcaactcacagagtttaacctttcttttcatagagcagttaggaaacactctgtttgtaaagtctgcaagtggatattcagacctctttgaggccttcgttggaaacgggatttcttcatgttctgctacacagaagaattctcagtaacttccttgtgttgtgtgtattcaactcacagagttgaacgatcctttacacagagcagacttgaaacactctttttgtagaatttccaagtggagatttcagccgctttgaggtcaatagtggaaaaggaaatatcttcgtagaaaaactagacagaatgattctcagaaacgcctttgtgatgtgtgcgtgcaactcacagagtttaacctttcttttcatagagcagttaggaaacactctgtttgtaaagtctgcaagtggatattcagacctctttgaggccttcgttggaaacgggtttttttcatataaggctagacagaagaattctcagtaacttccttgtgttgtgtgtattcaactgacagagttgaactttcatttagagagagcaggtttgaaacactgtttttgtggaatttgcaagtggagatttcaagcgctttggggccaaaggcagaaaaggaaatatcttcgtataaaaactagacagaatcattctcagaatctgctgcgtgatgtgtgcgttcaactctcagagtttaacttttcttttcattcagcggtttggaaacactctgtttgtaaagtctgcacgtggatattttgaccacttagaggccttcgttggaaacgggtttttttcatgtaaggctagacagaagaattcccagtaacttccttctgttgtgtgcattccactcacagagttgaacgttcccttagacagagcagatttgaaacactctatttgtgcaatttgcaagtgtagatttcaagcgctttaaggtcaatggcagaaaaggaaatatcttcgtttcaaaactagacagaatcattcccacaaactgcgttgtgatgtgttcgttcaactcacagagtttaacctttctgttcatagagcagttaggaaacactctgtttgtaaagtctgtaagtggatattctgacattttttggccttcgttggaaaagggatttcttcatattctcctagacagaagaattctcagtaacttccttgtgttgtgtgtattcaactcacagagttgaacgatcctttacacagagtagacttgaaacactctttttgtggaatttgcaagtggagatttcagccgctttcaggtcaatagtagaaaaggaaatatcttcgtagaaaaactagacagaatgattctcagaaactcctttgtgatgtgtgcgttcaactcacagagtttaacctttcttttcatagcgcagttgggaaacactctgtttgtaaagtctgcaagtggatattcagacctccttgaggctttcgttggaaacgggatttcttcatattctgctagaaagaagaattcccagtaacttccttgtgttgtgtgtgttcaactcacagagttgaactttcatttacacagagcagacttgaaacactctttttgtggaatttgcaagtggagatttcaagcgctttgaggccaaaggcagaaaaggaaatatcttcgtttcaaaactagacagaatcattctcagaaactgctctgcgatgtgtgcgttcaactctcagagtttaacttttcttttcattcagcagtttggaaacactctgtttgtaaagtctgcacgtggatattttgaccacttagaggccttcattggaaacgggtttttttcctgtaaggctagacagaagaattcccagtaacttccttgtgttgtgtgcattcaactcacagagttgaacgttcccttagacagagcagatttgaaacactctatttgtgcaatttgcaagtgtagttttcaagcgctttaaggtcaacggcagaaaaggaaattcttcgtttcaaaactagacagaatgattctcagaaactcctttgtgatgtgtgcgttcaactcacagagttcaacctttcttttaatagagcagttgggaaacactctgtttgtaaagtctgcaagtggatattcagacctccttgaggccttcgttggaaacgggatttcttcatattatgctagacagaataattctcagtaacttccttgtgttgtgtgtattcaactcacagagttgaacgatcctttacacagagcagacttgaaacattctttttgtggaatttgctagtggagatttcagccgctttgaggtcaatggtagaataggaaatatcttcctatagaaactagacagaatgattctcagaaactcctttgtgatgtgtgcgttcaactcacagagtttaacctttcttttcatagagtagttaggaaacactctgtttgtaaagtctgcaagtggatattcagacatccttgaggctttcgttggaaacgggatttcttcatattctgttagaaagaagaattcccagtaacttcccttgtgttgtgtgtgttcaactcacagagttgaactttcatttacacagagcagatttgaaacactctttttgtggaatttgcaaatggaggtttcaagcgctttgaggccaaaggcagaaaaggaaatatcttcgtataaaaactagacagaatcattctcagaaactgctgcgtgatgtgtgcgttcaactctcagagtttaacttttcttttcattcagcggtttggaaacactctgtttgtaaagtctgcacgtggatattttgaccacttagaggccttcgttggaaacgggttttttgcatgtaaggctagacagaagaattcccagtaacttccttgtgttgtgtacattcaactcacagagttgaacgttcccttagacagagcagatttgaaacactctttttgtgcaattggcaaatggagatttcaagcgctttaaggtcaatggcagaaaaggaaatattcttcgtttcaaaactagacagaatgattctcagaaaatcttttgtgatgtgtgcgttcaactcacagagtttaacttttcttctcatagagcaggtaggaaacactctgtttgtaaagtctgcaagtggatattcagacctctttgaggccttcgttggaaacgggatttcttcatattatgctagacagaataattctcagaaacttccttgtgttgtgtgtattcaactcacagagttgaaggatcctttacagagagcaggcttgaaacactctttttgtcgaatttgcaagtggagatttcagccgctttgaggtcaatggtagaataggaaatatcttcttatagaaactagacagaatgattctcagaaactcccttgtgatgtgtgcgttcaactcacagagtttaagctttcttttcatagagcagttaggaaacactctgtttgtaaagtctgcaagtggatattcagacctccttgaggccttcgttggaaacaggatttcttcatatgatgctagacagaagaattcccagtaacttccttgtgttgtgtgtgttcaactcacagagttgaactttcatttacccagagcagatttgaaacactctttttgtggaatttgcaagtggagatttcaagcgctttgaggccaaaggcagaaaaggaaatatcttcgtttcaaaactagacagaatcattctcagaaactgctctgcgatgtgtgcgttcaactctcagagtttaacttttcttttcattcagcagtttggaaacactctgtttgtaaagtctgcacgtggatattttgaccacttagaggccttcgttggaaccgggtttttttcctgtaaggctagacagaagaattcccagtaacttccttgtgttgtgtacattcaactcacagagttgaacgttcccttagacagagcagatttgaaacactctttttgtgcaattggcaaatggagatttcaagcgctttaagttcaatggcagaaaaggaaatatcttcgtttcaaaactagacagaatgattctcagaaactcctttgtgatgtgtgcgttcaactcacagagtttaacctttctgttcatagagcagttaggaaacactctgtttgtaaagtctgcaagtggatattcagacctccttgaggctttcgttggaaacgggatttcttcatattctgctagacagaagaattctcagaaacttccttgtgttgtgtgtattcaactcacagagttgaacgatcgtttacacagagcagacttgagacactctttttgtggaatttgtaagtggagattgcagccgctttgaggtcaatggtagaaaagaaaatatcttcatataaaaactagacagaatgattctcagaaactcctttgtgatgtgtgcgttcaactcacagagtttaacttttgttttcatagagcagttaggaaacactctctttgtatagtcttcaagtggatattcagacctctttgaggccttcgttggaaacgggatttcttcatattctgctagacagaagaattcccagtaacttccttgtgttgtgtgtgttcaactcacagagttgaactttcatttacacagagcagatttgaaacactctttttgtggaatttgcaagtggagatttcaagcgctttgagggcaaaggcagaaaaggaaatatcttcgtttcaaaactagacagaatcattctcagaaactgctgcgtgatgtgtgcgttcaactctcagagtttaaattttcttttcattcagcggtttggaaacactctgtttgtaaagtctgcacgtggaaattttgaccacttagaggccttcgttggaaacgggattttttcatgtaaggctagacagaagaattcccagtaacttccttgtgttgtgtgcattcaactcacagagttgaacgttccttagacacagcagatttgaaacactctatttgtgcaatttgcaagtgtagatttcaagcgctttaaggtcaatggcagaaaaggaaatatcttcgtttcaaaactagacagaatgattctcagaaactcctttgtgatgtgtgtgttcaactcacagagtttaacttttcttctcatagagcagttaggaaacactctgtttgtaaagtctgtaagtggatattctgacatcttgtggccatcgttggaaacgggatttcttcatattctgctagacagaagaattctcagtaactttccttgtgttgtgtgtattcaactcacagagttgaacgatcctttacacagagcagacttgaaacactctttttgtggaatttgcaagtggagatttcagccgctttgaggtcaatggtagaaaaggaaactatcttcatataaagactagacagaatgattctcagaaactcctttgtgatgtgtgcgttcaactcacagagtttaacctttcttttcatagagcagttaggaaacactctgtttgtaaagtctacaagtggatattcagacctccttgaggccttcgttggaaacgggatttcttcatattatgctagacagaataattctcagtaacttccttgtgttgtgtgtattcaactcacagagttgaaggatcctttacagagagcaggcttgaaatactctttttgtcgaatttgcaagtggagatttcagccgctttgaggtcaatggtagaataggaaatatcttcttatagaaactagacagaatcattctcagaaactgctgcgtgatgtgtgcgttcaactctcagagtttaacttttcttttcattcagcggtttggaaacactctgtttgtaaagtctgcacgtgggtattttgaccacttagaggccttcgttggaaacgggtttttttcatgtaaggctagacagaagaattcccagtaacttccttgtgttgtgtgcattcaactcacagagttgaacgttcccttagacagagcagatttgaaacactctatttgtgcaatttgcaagtgtagatttcaagcgctttaaggtcaatggcagaaaaggaaatatcttcgtttcaaaactagacagaatgattctcagaaaatcctttgtgatgtgtgcgttcaactcacagagtttaacttttcatatagcagttaggaaacactttgtttgtaaagtctgcaagtggatattcagacctctttgaggcattcgttggaaacgggatttcttcatattctgctagacagaagaattctcagaaacttccttgtgttgtgtgtattcaactcagagagttgaacgatcctttacacagagcagacttgaaacacactttttttggtattttcaagtggagatttcagccactttgaggtcaatggtagaaaaggaaatatcttcgtataaaaactagacagaatgattctcagaaactcctttgtgatgtgtgcgttcaactcacagagtttaacttttcttttcatagagcagttaggaaacactctgtaaagtctgcaagtgcatattcagacctctttgaggccttcgttggaaacgggatttcttcatattatgctagacagaataattctcagtaacttccttatgttgtgtgtattcaactcacagagttgaacgatcctttacaaagagcagacttgaaacactctttttgtggaattcgcaagtggagatttcagccgctttgaggtcaacagtagaaaaggaaatatcttcgtagaaaaactagacagaatcattctcagaaactgctgtgtgatgtgtgctttcaactcagagagtttaacttttcttttcattcagcagtttggaaacactctgtttgtaaagtctgcaagtggatatattgacctcttagggtccttcgttggaaacgggttttttttcatgtaaggctagacagaagaattctcagtaacttccttgtgttgtgtgtattcaactcacagagttgaacgatcctttacactgagcagacttgtaacactctttttgtggaatttgcaagtggagatttcagccgctttgaagtcaaaggtagaaaaggaaatatcttcctataaagactagacagaacgattctcagaaactcctttgtgatgtgtgcgttcaactcacagagtttaacctttcttttcatagagcagttaggaaacactctgtttgtaaagtctgcaagtggatatgcagacctctttgaggccttcgttggaaacgggatttcttcatattctgctagacagaagaattctcagtaacttaccttgtgttgtgtgtattcaactcacagagttcaacgatcctttacacagagcagacttgaaacactctttttgtggaatttgcaagtggagatttcagccgctttgaggtcaatggtagaaaaggaaatatcttcgtataaaaactaaacagaacgattctcagaaactcctttgtgatgtgtgcgttcaactcacagagtttaacctttcttttcatagagcagttaggaaacactctgtttgtaaagtctgcaaatggatattcagacctctttgaggccttcggtggaaacgggatttcttcatattctgctagacagaagaattctcagtaactttccttgtgttgtgtgtattcaactgacagagttgaactttcatttagagagagcagatttgaaacactgtttttgtggaatttgcaagtggtgatttcaagcgctttggggccaaaggcagaaaaggaaatatcttcgtataaaaactagacagaatcattctcagaaactgctgcgtgatgtgtgcgttcaactctcagagtttaacttttcttttcattcagcggtttggaaacactctgtttgtaaagtctgcacgtggaaattttgaccacttagaggccttcgttggaaacgggattttttcatgtagggctagacagaagtattctcagtaacttccttgtgttgtgtgtattcaactcacagagttaaacgatcctttacacagagcagacttgtaacactctttttgtggaatttgcaagtggagatttcagccgctttgaagtcaaaggtagaaaaggaaataacttcctataaaaactagacagaatgattctcagaaacttctttgtgatgtgtgcgttcaactcacagagtttaacatttcttttcatagagcagttaggaaacactctgtttgtaaactctgcaagtggatattcagacctctttgaggccttcgttggaaacgggatttcttcatactgtgctagacagaagaattctcagtaatttccttgtgttgtgtgtattcaactcacagagttcaacgatcctttacacagagcagacttgaaacactctttttgtggaatttgcaagtggagatttcagccgctttgaggtcaatggtagaaaagtaaatatcttcgtataaaaactagacagaatgattctcagaaactcctttgtgatgtgtgcgttcaactcacagagtttaacttttcttttcatagagcagttagtaaacactctgtttataaagtctgcaagtggatattcagacccctctgaggacttcgttggaaacgggatttcttcatattatgctagacagaagaattcccagtaacttccttgtgttgtgtgtgttcaactcacagagttgaactttcatttacacagagcagatttagaacacactttttgtggaatttgcaagtggagatttcaagcgctttgaggccaaaggcagaaaaggaaatatcttcgtataaaaactagacagaataattctcagaaactgctgcgtgatgtgtgcgttcaactctcagagtttaacttttcttttcattcagcagtttggaaacactctgtttgtaaagtctgcacgtggataatttgaccacttagaggtcttcgttggaaacgggtttttttcatgtaaggctagacaaaagaattctcagtaacttccttgtgttgtgtttattcaactcacagagttgaacgatcctttacacagagcagacttgtaacactctttttgtggaatttgcaagtggagatttcagccgctttgaagtcaaaggtagaaaaggaaatatcttcctataaaaactagacagaatgattctgagaaactcctttgtgatgtgtgcgttaaactcacacagtttaacctttcttttcatagagcagttaggaaacactctgtttgtaaagtctgcaagtggatattcagacctccttgaggccttcgttggaaacgggatttcttcatattatgctagacagaagtaattctcagtaacttccttgtgttgtgtgtattcaactcacagagttaaacgatcctttacacagagcagacgtgaaacactctttttgtggaatttggaagtggagatttcagccgctttgaggtcaatggtagaaaaggaaactatcttcatataaagactagacagaatgattctcagaaactcctttgtgatgtgtgcgttcaactcacagagtttaacctttcttttcagagagcagttaggaaacactctgtttgtaaagtctgcaagtggatattcagacatctttgaggctttcgttggaaacgggatttcttcatattctgctagacagaagaattcccagtaacttccttgtgttgtgtgtgttgaactcacagagttgaactttcatttacacagagcagatttgaaacactctttttgtggaatttgcaagtggagatttcaagcgctttgaggccaaaggcagagaaggaaatatcttcgtttgaaaactagacagaatcattctcagaaactgctctgcgatgtgtgcgttcaactctccgagtttaacttttcttttcattcagcagtttgaaaacactctgtttgtaaagtctgcacgtggataatttgaccacttagaggccttcgttggaaacggtttttttttcatgtaaggctagacagaagaattcccagtaacttccttgtgttgtgtacattcaactcacagagttgaacgttcccttagacagagcagatttgaaatactctttttgtgcaattggcaagtggagatttcaagcgctttaaggtcaatggcagaaaaggaaatatcttagtttcaaaactagacagaatcattcccacaaactgcgttgtgatgtgttcgttcaactcacagagtttaacctttcttttcatagagcagttaggaaacactctgtttgtaaagtctgtaagtggatattctgacatcttgtggccttcgttggaaacgggatttcttcatattctgctagacagaagaattctcagtaacttccttgtgttgtgtgtattcaactcacagagttgaacgatcctttacacagagcagacttggaacactctttttgtggaatttgcaagtggagatttcagccgcgttgaagtcaatggtagaaaaggaaatatcttcgtataaaaactagacagaatgattctcagaaactcctttgtgatgtgtgcgttcaactcacagagtttaacttttcttttcatagagcagttaggaaacactctgtttataaagtctgcaagtggatattcagacctctttgtggccttcgttggaaacgggatttcttcatattatactagacagaagaattctcagtaacttccttgtgttgtgtgtattcaactgacaaagttgaactttcatttagagggagcagatttgaaacactgtttttgtggaatttgcaagtggagatttcaagcgctttggggccaaaggcagaaaaggatatatcttcgtataaaaactagacagaatcattctcagaaactgctgcgtgatgtgtgcgttcaactctcagagtttaacttttcttttcattcagcggtttggaaacactctgtttgtgaagtctgcccgtggatattttgaccccttagaggccttcgttggaaacgggtttttttcatgtaaggctagacagaagaattcccagtaacttccttgtgttgtgtacattcaactcacagagttgaacgttccccttagacagagcagatttgaaacactctttttgtgcaattggcaagtggagatttcaagcgctttaaggtcaatggcagaaaaggaaatatcttcgtttcaaaactagacagaatgattctcagaaactactttgtgatgtgtgcgttcaactcacagagtttaacctttcttttcatagagcagttaggaaacactctgtttgtaaagtctgcaagtggatattcagacctccttgaggccttcgttggaaacgggatttcttcatattatgcaagacagaagaattctcagtaacttccttgtgttgtgtgtattcaactcacagagttgaacgatcctttacacagagcagacttgaaacactcttcttgtggaatttgcaagtggagatttcagccgctttgaggtcaatggtagaataggaaatatcttcgtatagaaactagacagaatgattctcagaaactcctttgtgatgtgtgcgttcaactcacagactttaacctttcttttcatagagcagttaggaaacactctgtttgtaaagtctgcaaatggatattcagacctctttgaggccttcgttggaaacgggtttttttcatataaggctagacagaagaattcccagtaacttccttgtgttgtgtgtgttcaactcacagagttgaactttcatttacacagagcagatttgaaacactctttttgtggaatttgcaagtggagatttcaagcgctttgaggccaaaggcagaaaaggagatatcttcgtataaaaactagacagaatcattctcagaaactgctgcgtgatgtgtgcgatcaactctcagagattaacttttcttttcattcagcggtttggaaacactctgtttgtaaagtctgcacgtggaaattttgaccacttagagaccttcgttggaaacgggattttttcatgtaaggctagacagaagaattcccagtaactttccttgtgttgtgtgcattcaactcacagagttgaacgttcccttagacagagcagatttgaaacactctatttgtgcaatttgcaagtgtagatttcaagcgctttaaggtcaatggcagaaaaggaaatgtcttcgtttcaaaactagacagaatcattcccaaaaactgcgttgtgatgtgttcgttcaactcacagcagtttaacctttcttttcatagagcagttaggaaacagtctgtttgtaaattctgtaagtggatattctgacatcttgtggccttcgttggaaacgggatttcttcatattctgctagacagaataattctcagtaacttccttgtgttgtgtgtattcaactcacagagttgaacgatcctttacacagagcagacttgaaacactgtttttgtggaatttgcaagtggagatttcagccgctttgagctcaatggtagaataggaaatatcttcctatagaaactagacagaatgattctcagaaactcctttgtgatgtgtgcgttcaactcacagagtttaacctttcttttcatagagcagttaggaaacactctgtttgtaaagtctgcaagtggatattcagacctctttgaggccttcgttggaaacgggatttcttcatattctgccagacagaagaattcccagtaacttccttgtgttgtgtgtgttcaactcacagagttgaactttcatttacacagagcagatttgaaacactctttttgtggaatttgcaagtggagatttcaagcgctttgaggccaaaggcagaaaaggaaatatcttcgtataaaaactacacagaatcattctcagaaactgctgcgtgatgtgtgcgttcaacactcagagtttaacttttcttttcattcagcggtttggaaacactctgtttgtaaagtcggaacgtgcatattttgaccacttagaggccttcgttggaaacgggtttttttcatgtaaggctagacagaagaattcccagtaacttccttgtgttgtgtacattcaactcacagagttgaacgttcccttagacagagcagatttgaaacactctttttgtgcaattggcaagtggagatttcaagcgctttaaggtcaatggcagaaaaggaaataacttcgtttcaaaactagacagaatcattcccacaaactgcgttgtgatctgttaggtaaactcacagagtttaaccattcttttcatagagcagttaggaaacagtctgtttgtaaattctgtaagtggatattctgacatcttgtggccttcgttggaaacgggatttcttcatattctgctagacagaagaactctcagaatcttccttgtgttgtgtgtattcaactcacagagttgaacgatggtttacacagagcagatttgaaacactctttttgtggaatttgcaagtggagatttcagccgctttgaggtcaatggtagaaaaggaaatatcttcgtataaaaactagacagaatgattctcagaaactcctttgtgatgtgtgtgttcaactcacagagtttaacctttctattcatagagtagttaggaaacactctgtttgtaatgtctgcaagtggatattttgacctctttgaggccttcgttggaaacgggtttttttcatgtaaggctagacagaagaattctcagtaacttccttgtgttgtgtgtattcaactgacagagttgaactttcatttagagagagcagatttgaaacactgtttttgtggaatttgcaagtggagatttcaagcgctttggggccaaaggcagaaaacgaaatatcttcgtataaaaactagacagaatcattctcagaaactgctgcgtgatgtgtgcgttcaactctcagagtttaacttttcttttcattcagcggtttggaaacactctcgtttgtaaagcctgcacgtggatattttgaccacttagaggccttcgttggaaacgggtttttttcatgtaaggctagacagaagaattcccagtaacttccttgtgttgtgtgcattcaactcacagagttgaacgttcccttagacagagcagatttgaaacactctatttgtgcaatttgtaagtgtagttttcaagctctttaaggtcaacggcagaaaaggaaatatcttcgtttcaaaactagatcagaatcattcccacaaactgcgttgtgatgtgttcgttcaactaacagagtttaacctttcttttcatagagcagttaggaaacactctgttggtaaattctgtaagtggatattctgacatcttgtggccttcgttggaaacgggatttctacatattctgctagacagaggaattctcagtaacttccttgtgttgtgtgtattcaactcacggagttgaacgatcctttacacagagcagacttgaaacactctttttgtggaatttgcaagtggagatttcagccgctttgaggtcaatagtagaaaaggaaatatcttcgtagaaaaactagacagaatgattctcagaaactcctttgtgatgtgtgtgttcaactcacagagtttaacctttcttttcatagagcagttagtaaacactctgtttataaagtctgcaagtggatattcagacccatttgaggccttcgttggaaacgggatttcttcatattctgctagacagaagaattcccagtaacttccttgtgttgtgtgtgttcaactcacagagttgaactttcatttacacagagcagatttgaaacactctttttgtggaatatgcaagtggagatttcaagcgctttgagaccaaaggcagaaaaggaactatcttcgtttgaaaactagacagaatcattctcagaaactgctctgcgatgtgtgcgttcaactctcagagtttaacttttcttttcattcagcagtttggaaacactctgtttgtaaagtctgcacgtggatattttgaccacttagaggccttcgttggaaacgggtttttttcctataaggctagacagaagaattcccagtaacttccttgtgttgtgtacattcaactcacagagttgaacgttcccttagacagagcagatttgaaacactctttttgtgcaattggcaagtggagatttcaagcgctttaaggttaatggcagaaaaggaaatatcttcgtttcaaaactagacagaatcattcccacaaactgcgttgtgatgtgttcgttcaacacacagagtttaacctttcttttcatagagcagttaggaaacagtctgtttgtaaattctgtaagtggatattctgacatcttgtggccttcgttggaaacgggatttcttcatattctgctagacagaagaattctcagtaacttccttgtgttgtgtgtattcaactcacagagttgaacgatcctttacacagagcagatttgaaacactctttttctggaatttgcaagtggagatttcagccgctttgtggtcaatggtagaaaaggaaatatcttcatataaaaactagacagaatgattctcagaaactcctttgagatgtgtgtgttcaactcacagagtttaacctttcttttcatagagcagttaggaatcactctgtttgtaaagtctgcaagtggatattcagacctctttgaggccttcgttggaaaagggtttttttcatataaggctagagagaagaattcccagtaacttccttgtgttgtgtgtgttcaactcacagagttgaacttccatttacacagagcagatttgaaacactctttttgtggaatttgcaagtggagatttcaagcgctttgaggccaaaggcagaaaaggaaatatcttcgtttcaaaactagacagaatcattctcagaaactgctctgcgatgtgtgcgttcaactctcagagtttaacttttcttttcattcagcagtttggaaacactctgtttgtaaagtctgcacgtggatattttgaccacttagaggccttcgttggaaacgggtttttttcctgtaagactagacagaagaattcccagtaacttctttgtgttgtgtacattcaactcacagagttgaacgttcccttagacagagcagatttgaaacactctttttgtgcaattggcaagtggagatttcaagcgctttaaggtcaatggcagaaaaggaaatatcttcgtttcaaaactagacagaatgattctcagaaactcctttgtgatgtgtgcgttcaactcacagagtttaacctttgttttcatagagcagttaggaaacactctgtttgtaaagtctgaaagtggatattcagacctctttgaggccttcgttggaaacgggtttttttcatataaggctagagagaagaattcccagtaacttccttgtgttgtgtgtattcaactcacagagttgaacgatcctttacacagagcagacttgtaacactctttttgtggaatttgcaagtggagatttctgccgctttgaagtcaaaggtagaaaaggaaatatcttcctataaaaactagacagaatgattctcagaaactcctttgtgatgtgtgcgttcaactcacagagtttaccctttcttttcatagagcagttaggaaacactctgtttgtaaagtttgcaagtggatattcagacatccttgaggctttcgttggaaacgggatttcttcatattctgccagaaagaagaattcccagtaacttccttgtgttgtgtgtgttcaactcacagagttgaacattcatttacacagagcagatttgaaacactctttttgtggaatttgcaagtggagatttcaagcgctttgaggccaaaggcagaaaaggaaatatcttcgtttcaaaactagacagaatcattctcagaaactgctctgcgatgtgtgcgttcaactctcagagtttaacttttcttttcattcagcagtttggaaacactctgtttgtaaagtctgcacgtggatattttgaccacttagaggccttcgttggaaacggttttttttcctgtaaggctaaaaagaagaattctcagtaacttccttgtgttgtgtgtattcaactcacacagttgaacgatcctttacacagagcagacttgtaacactctttttgtggaatttgcaagtggggatttcagccgctttgaagtcaaaggtagaaaaggaaatatcttcctataaaaactagacagaatgattctcagaaactcctttgtgatgtgtgctttcaactcacagagtttaacctttcttttcatagagcagttaggaaacactctgtttgtaaagtctgcaagtggatattcagacctctttgaggccttcgttggaaacgggtttttttcatataaggctagacagaagaattctcagtaacttccttgtgttgtgtgtattcaactcacagtgttgaacgatcctttacacagagcagacttgaaacactctttttgtggaatttgcaagtggagatttcagccgctttgaggtcaatagtagaaaaggaaatatcttcgtagaaaaactagacagaatgattctcagaaactcctttgttatgtgtgcgttcaactcacagagtttaacctttcttttcatagagcagttaggaaacactctgtttgtaaagtctgcaagtggatattcagacatccttgaggctttcgttggaaacgggatttcttcatattctgctagaaagaagaattcccagtaacttccttgtgttgtgtgtgttcaactcacagagttgaactttcatttacacagagcagatttgaaacactctttttgtggaatttgcaaatggagatttcaagcgctttgaggccaaatgcagaaaagaaaatatcttcgtataaaaactagacagaatcattctcagaaactgctctgcgatgtgtgcgttcaactctcagagtttaacttttcctttcattcagcagtttggaaacactctgtttgtaaaatctgcacgtgcataatttgaccacttagaggccttcgttggaaacgggttttttccatgtaaggctagacagaagaattcccagtaacttccttgtgttgtgttcattcaactcacagagttgaacgttcccttagacagagtagatttgaaacactctttttgtgcaattggcaagtggagatttcaagcgatttaaggtcaatggcagaaaaggaaatatcttcgtttcaaaactagacagaatcattcccacaaactgcgttgtgatgtgttcgttcaactcacagagtttaacctttctgttcatagagcagttaggaaacactctgtttgtaaagtctctaagtggatattctgacatcttgtggccttcgttggaaacgggatttcttcatattctgctagacagaagaattctcagtaacttccttgtgttgtgtgtattcaactcacagagttgaacgatcctttacacagagcagacttgaaacactctttttgtggaatttgcaagtggagatttcagccgctttgaggtcaatggtagaaaaggaaatctcttcgtataaagactagacagaatgattctcagaaactcctttgtgatgtgtgcgttcaactcacagagtttaacctttcttttcatagagcagttaggaaacactctgtttgtaaagtctgcaagtggatattcagacttctttgaggctttcgttggaaacgggatttcttcatattctgctatacagaagaattcccagtaacttccttgtgttgtgtgtgttcaactcacagagttgaactttcatttacacagagcagatttgaaacactctttttgtggaatttgcaaatggagatttcaagcgctttgaggccaaaggcagaaaaggaaatatcttcgtataaaaactcgacagaatcattctcagaaactgctctgcgatgtgtgcgttcaactctcagagtttaacttttcttttcattcagcagtttggaaacactctgtttgtaaagtctgcacatggaaaacttgaccacttagaggccttcgttggaaacgggttttttttatgtaaggctagacagaagaattctcagtaacttccttgtgttgtgtgtattcaactcaaagagttgaacgatcctttacacagagcagacttgtaacactctttttgtggaatttgcaagtggagatttcagccgctttgaagtcaaaggtagaaaatgaaatatcttcctataaaaactagacagaatcattcccacaaactgcgttgtgatgtgttcgttcaactcacagagtttaacctttctgttcatagagcagttaggaaacactctgtttgtaaagtctgtaagtggatattctgacatcttgtggccttcgttggaaacgggatttcttcgtattctgctagacagaagaattctcagtaacttccttgtgttgtgtgtattcaactcacaggatttgaacgatcctttacacagagcggacttgaaacactctttttgtggaatttgcaagtggagatttcagccgcgttgaggtcaatggtagaaaaggaaatatcttcgtataaaaactagacagagtgattctcagaaactcctttgtgatgtctgcgttcaactgacagagtttaacctttcttttcatagagcagttaggaaacactctgtttgtaaagtctgcaagtggatattcagacctccttgaggccttcgttggaaacgggatttcttcatattctgctatacagaagaattcccagtaacttccttgtgttgtgtgtgttcaactcacagagatgaactctcatttacacagagcagatttgaaacactctttttgtggaatttgcaagtggagatttcaagcgctttgaggccaaaggcagaaaaggaaatatcttcgtataaaaactagacaaaatcattctcagaaactgctctgcgatgtgtgtgttcaactctcagagtttaacttttcttttcattcagcagtttggaaacactctgtttgtaaagtctgcacgtggataatttgaccacttagaggccttcgttggaaacgggtttttttcatgtaaggctagacagaagaattcccagtaaattccttgtgttgtgtacattcaactcacagagttgaacgttcccttagacagagcagatttgatacactctttttgtgcaattggcaagtggagatttcaagcgctttaaggtcaatggcagaaaaggaaatatcttcgtttcaaaactagacagaatgattctcagaaactcctttgtgatgtgtgcgttcaacacacagagtttaacttttcttttcatagagcagttaggaaacactctgtttgtaaagtctgcaagtggatattcagacctctttgaggccttctttggaaacgggatttcttcatattatgctagacagaataattctcagtaacttccttgtgttgtgtgtattcaagtcacagagttgaacgatcctttacagagagcagacttgaaacactctttttgtggaatttgcaagtggagatttcagccgctttgaggtcaatagtagaaaaggaaatatcttcgtagaaaaactagaaagaatgattctcagaaactcctttgtgatgtgtgtgttcaactcacagagtttaacctttcttttcatagagcagtttggaaacactctgtttgtaaagtctgcaagtggatattcagacctcgttgaggccttcgttggaaacgggatttcttcatattctgctagacagaagaattcccagtaacttccttgtgttgtgtgtgttcaactcacagagttgaactttgatttacacagagcagatttgaaacactctttttgtggaatttgcaagtggaaatttcaagcgctttgaggccaaaggcagaaaaggaaatatcttcgtataaaaactagacagaatcattctcagaaactgctgtgtgatgtgtgcgttcaactctcagagtttaacttttcttttcattcagcggtttggaaacactctgtttgtaaagtctgcacgtggatattttgaccacttagaggccttcgttggaaacgggtttttttcatgtaaggctagacagaagaattcccagtaacttccttgtgttgtgtgcattcaactcacagagatgaacgttcccttagacagaacagatttgaaacactctatttgtgcaatttgcaagtgtagatttcaagcgctttaaggtcaatggcagaaaaggaaatatcttcgtttcaaaactagacagaatcattcccacaaactgcgttgtgatgtgttcgttcaactcacagagtttaacctttctgttcatagagcagttaggaaacactctgtttctaaagtctgtaagtggatattctgacatattgtggccttcgttggaaacgggatttcttcatattctgctagacagaaaaattctcagtaacttctttgtgttgtgtgtattcaactcacagagttgaacgatcctttacacagagcagacttgaaacactctttttgtggaatttgcaagtggagatttcagccgctttgaggtcaacggtagaataggaaatatcttcctatagaaactagacagaattattctcagaaactcctttgtgatgtgtgcgttcaactcacagagtttaacctttcttttcatagagcagttaggaaacactctgtttgtaaggtctgcaagtggatattcagagctccttgaggccttctttggaaacgggatttcttcatattatgctggacagaagaattctcagtaatttccttgtgttgtgtgtattcaactcacagagttgaacgatcctttacacagagcagacttgaaacactctttttgtggaatttgcaaggagatttcagccgctttgaggtcaatggtagaataggaaatatgtacctatagaaactagacagaatgattctcagaaactcctttgtgatgtgtgcgttcaactcacagaggttaacctttcttttcatagagcagttaggaaacactctgtttgtaaagtctgcaagtggatattcagacctccttgaggccttcgttggaaacgggatttcttcatattatgctagacagaagaattcccagtaacttccttgtgttgtgtacattcagctcacagagttgaacgttcccttagacagagcagatttgaaacactctttttgtgcaattggcaaatggagatttcaagcgctttaaggtcaatggcagaaaaggaaatatcttcgtttcaaaactagacagaagcattcccacaaactgcgttgtgatgtgttcgttcaactcacagagtttaacctttcttttcatagagcagttaggaaacagtctgtttgtcaattctgtaagtggatattctgacatcttgtggccttcgttggaaacgggatttcttcatattctgctagacagaagaattctcagtaacttccttgtgttgtgtgtattcaactcacagagttgaacgatcctttacacagagcagacttgaaacactctttttgtggaatttgcaagtggagatatcagccgctttgaggtcaatggtagaataggaaatatcttcctatagaaaatagacagaatgattctcagaaactcctttgtgatgtgtgtgttcaactcacagcagtttaacctttcttttcatagagcagttagtaaacactctgtttataaagtctgcaagtggatattcagacccctttgaggccttcgttggaaacgggatttcttcatattatgctagacagaagaattcccagtgacttccttgtgttgtgtgtgttcaactcacagagttgaactttcatttacccagagcagatgtgaaacactctttttgtggaatttgcaagtggagatttcaagcgctttgaggccaaaggcagaaaaggaaatatcttcgtttcaaaactagacagaatcattctcagaaactgctgcgtgatgtgtgcgttcaactctcagagtttaacttttcttttcattcagcggtttggaaacactctgtttgtaaagtctgcacgtggatattttgaccacttagaggccttcgttggaaacggaattttttcatgtgaggctagacagaagaattcccaagtaacttccttgtgttgtgtacattcaactcacagagttgaacgttcccttagacagagcagatttgaaacactctttttgtgcaattggcaaatggagatttcaagcgctttaaggtcaatggcagaaaaggaaatatcttcgtttcaaaactagacagaatcattcccacaaactgcgttgtgatgtgttcgttcaactcacagagtttaacctttctgttcatagagcagttaggaaacactctgtttgtaaagtctgtaagtggctattctgacatcttgtggcctttgttggaaacgggatttcttcatattctgctagacagaagaattctcagtaacttccttgtgttgtgtgtattcaactcacagagttgaacgatcctttacacagagcagacttgaaacacactttttgtggaatttgcaagtggagatttcagccgctttgaggtcaatggtagaaaaggaaatatcttcgtataaagactagacagaatgattctcagaaacgcctttgtgatgtgtgctttcaactcacagagtttaacttttcttttcatagagcagttaggaaacactctgtttataaagtctgcaagtggatattcagacctctttgaggtcttcgttggaaacgggatttctccatactatgctagacagaagaattcccagtaacttccttgtgttgtgtgtgttcaactcacagagttgaactttcatttacacagagcagatttgaaacactctttttgtggaatttgcaagtggagatgtcaagcgctttgaggccaaaggcagaaaaggaaatatcttcgtttcaaaactagacagaatcattctcagaaactgctctgcgatgtgtgcgttcaactctcagagtttaacttttcttttcattcagcagtttggaaacactgtgtttgtaaagtctgcacgtggataatttgaccacttagaggtcttcgttggaaacgggtttttttcatgtaaggctagacagaagaattctcagtaacttccttgtgttgtgtgtattcaactcacagagttgaacgatcctttacacagagcagacttgtaacactctttttgtggaatttgcaagtggagatttcatccgctttgaagtcaaaggtagaaaaggaaatctcttcgtataaaaactagacagaatgattctcagaaacttctttgtgatgtgtgcgttcaacacatagagtttaacctttcttttcatagagcagttaggaaacactctgtttgtaaagtctgcaagtggatattcagacctctttggggccttcgttggaaaagagatttcttcatactgtgctagacagaagaattctcagtaacttccttgtgttgtgtgtattcaactcacagagttgaacgatcctttacacagagcagacttgtcacactctttttgtggaatttgcaagtggagatttcagccgctttgaagtcaaaggtagaaaaggaaatatcttcctataaaaactagacagaatgattctcagaaactcctttgtgatgtgtgcgttcaactcacagagtttaacctttcttttcatacagcagttaggaaacactctgtttctaaagtctgcaagtggatattcagacctccttgaggccttcgttggaaacgggatttcttcatattatgctagacagaagaattctcagtaacttccttgtgttgtgtgtattcaactgacagagttgaactatcatttacagagagcagatttgaaacactgtttttgtggaatttgcaagtggagatttcaagcgctttggggccaaaggaagaaaaggaaatatcttcgtataaaaactagacagaatcattctcagaaactgctctgcgatgtgtgcgttcaactctcagagtttaacttttcttttcattcagcagtttggaaacactctgtttgtaaagtctgcacgtggatattttgaccacttagaggccttcgttggaaacgggtttttttcttgtaaggctagacagaagaattcctagtaacttccttgtgttgtgtacattcaactcacagagttgaacgttcccttagacagagcagatttgaaacactctttttgtgcaattggcaagtggagatttcagccgctttgaggtccatggtagaaaaggaaatatcttcgtataaaaactagacagaatcattcccacaaactgcgttgtgatgtgttcgttcaactcacagagtttaacctttctgttcatagagcagttaggaaacactctgtttgtaaagtctgtaagtggatattctgacatcttgttgccttgttggaaaagggatttcttcatattctggtagacagaagaattctcagtaacttcccttgtgttgtgtgtattcaactcacagagttgaacgatcctttacacagagcagacttgaaacactctttttgtggaatttgcaagtggagatttcagccgctttgaggtcaatggtagaataggaaatatcttcctatagaaactagacagaatgattctcagaaactcctttgtgatgtgtgcgttcaactcaaagagtttaacctttcttttcatagagcagttaggaaacactctgtttgtaaagtctgcaagtggatattcagacatccttgaggctttcgttggaaacgggatttcttcatattctgctagaaagaagaattcccagtaacttcgttgtgttgtgtgtgttcaactcacagagttgaacttccatttacacagagcagatttgaaacactctttttgtggaatttgcaagtggagatttcaagcactttgaggccaaaggcagaaaaggaaatatcttcgtttcaaaactagacagaatcattctcagaaactgctgcgtgatgtgtgcgttcaactctcagagtttaacttttcttttcattcagcggtttggaaacactctgtttgtaaagtctgcacgtggatattttgaccacttagaggccttcgttggaaacgggttttttttatgtaaggctagacagaagaattcccagtaacttccttgtgttgtgtgcattcaactcacagagttgaacgttcccttagacagagcagatttgaaacactctatttgtgtaatttgcaagtgtagatttcaagcgctttcaggtcaacggcagaaaaggaaatatcttcgtttcaaaactagacagaatcattcccacaaactgcgttgtgatgtgttcgttcaactcacagagtttaaccttcctgttcatagagcagttaggaaacactctgtttgtaaagtctgcaagtggatattcagacctccttgaggccttcgttggaaacgggatttcttcatattctgctagacagaagaattctcagtaactgccgtctgttgtgtgtattcaactcacagagttgaacgatcctttacacagagcagacttgaaacactctttttgtggaatttgcaagtggagatttcagccgctttgaggtcaatggtagaataggaaatatcttcctatagaaactagacagaatgattctcagtaaactcctttgtgatgtgtgtgttcaactcacagagtttaacctttcttttcatagagcagttaggaaacactctgtttgtaaagactgcaggtggatattcaggcctctttgaggccttcgttggaaacgggtttttttcatataaggctagacagaagaattcccagtaacttccttgtgtgtgttcaactcacagagttgaactttcatttacacagagcagatttgaaacactctttttgtggaatttgcaaatggagatttcaagcgctttgaggccaaaggcagaaaaggaaatatcttcgtataaaaacgagacagaatcattctcagaaactcctttgtgatgtgtgcgttcaactctcagagtttaacttttcttttcattcagcggtttggaaacactctgtttgtaaagtctgcacgtggaaattttgaccacttagaggccttcgttggaaacgggtttttttcatgtaaggctagacagaagaattcccagtaacttccttgtgttgtgtgcattcaactcacagagttgaacgttcccttagacagagcagatttgaaacactctatttgtgcaatttgcaagtgtagttttcaagctctttaaggtcaacggcagaaaaggaaatatcttcgtttcaaaactagacagaatgattctcagaaactcctttgtgctgtgtgcgttcagctcacagagtttaacctttcttttcatagagcagttaggaaacactctgtttgtaaagtctgcaagtggatattcagacatctttgaggccttcgttggaaacgggatttcttcatattctgctagacagaagaattctcagaaacttccttgtgttgtgtgttttcaactcacagagttgaacgatgctttacacagagtagacttgaaacactctttttgtgtaatttgcaagtggagatttcagccgctttgaggtcaatgctagaaaaggaaatatcttcgtataaaaactagacagaatgattctcagaaactcctttgtgatgtgtgcgttcaactcacagagtttaacctttcttttcatagagcagttaggaaacactctgtaaagtctgcaagtggatattcagacctccttgaggccttcgttggaaacgggatttcttcatattttgctagacagaagaattcccagtaacttccttgtgttgtgtgcgttcaactcacagagttgaactttcatttacacagagcagatttgaaacactctttttgtggaatttgcaagtggagatttcaagcgctttgaggccaaaggcagaaaaggaaatatcttggtataaaaactagacagaatgattctcagaaactcctttgtgatgtgtgcgttcaactcatcagagtttaacttttcttttcattcagcagtttggaaacactctgtttgtaaagtctgcacgtggatattttgaccacttagaggccttcgttggaaacgggtttttttcatgtaaggctagacagaagaattcccagtaacttccttgtgttgtgtacattcaactcacagagttgaacgttcccttagacagagcagatttgaaacactctttttgtgcaattggcaaatggagatttcaagcgctttaaggtcaatggcagaaaaggaaatatcttcgtttcaaaactagacagaatcattcccacaaactgcgttgtgatgtgttcgttcaactcacagagtttaacctttcttttcatacagcagttaggaaacagtctgtttgtcaattctgtaagtggatattctgacatcttgtggccttcgttggaaacgggatttcttcatattctgctagacagaagaattctcagtaacttccttgtgttgtgtgtattcaactcacagagttgaatgatcctttacacagagcagacttgaaacactctttttgtggaatttgcaagtggagatttcagccgctttgaagtcaatggtagaaaagaaaatatcttcgtataaagactagacagaatgattctgagaaatcctttgtgatgtgtgcgttcaactcacagagtttaacctttcttttcatagagcagttaggaaacactctgtttgtaaagtctgcaagtggatattcagacctccttgaggccttcgttggaaacgggatttcttcatattatgctagacagaagaattctcagtaacttccttgtgttgtgtgtattcaactgacagagttgaactttcatttagagagagcaggtttgaaacactgtttttgtggaatttgcaagtggagatttcaagcgctttggggccaaaggcagaaaacgaaatatcttcgtttaaaaactagacagaatcattctcagaaactgctctgcgatgtgtgcgttcaactctcagagtttaacttttcttttcattcagcagtttggaaacactctgtttgtaaagtctgcaggtggatattttgaccacttagaggccttcgttggaaacgggtttttttcctgtaaggctagacagaagaattcccagtaacttccttgtgttgtgtgcattcaactcacagagttgaacgttcccttagacagagcagatttgaaacactctatttgtgcaatttgcaagtgtagatttcaagcgctttaaggtcaatggcagaaaaggaaatatcttcgttttaaaactagacagaatcattcccacaaactgcgttgtgacgtgttcgttcaactcacagagtttaacctttctgttcatagagcagttaggaaacactctgtttgtaaagtctgcaagtggatattcagacctccttgaggccttcgttggaaacgggatttcttcatattctgctagacagaataattctcagtaacttccttgtgttttgtgttttcaactcaccgagttgaaggatcctttacagagagcaggcttgaaacactctttttctcgaatttgcaagtggagattacagccgctttgaggtcaatggtagaaaaggaaatatcttcgtataaagactagacagaatgattctcagaaactcctttgtgatgtgtgcgttcaactcacagagtttaacctttcttttcatagagcagttaggaaacactctgtttgtgaagtctgcaagtggatattcagacatccttgaggctttcgttggaaacgggatttcttcatattctgctagaaagaagaattctcagtaacttccttgtgttgtgtgtattcaactgacagagttgaactttcatttagagtgagcagatttgaaacactgtttttgtggaatttgcaagtggagatttcaagcgctttggggccaaaggcagaaaaggaaatatcttcgtataaaaactagacagaatcattctcagaaactgctgcgtgatgtgtgcgttccactctcagagtttaacttttcttttcattcagcggtttggaaacactctgtttgtaaagtctgcacgtggatattttgaccacttagaggccttcgttggaaacgggttttttttcatgtaaggctagacagaagaattcccagtaacttccttgtgttgtgtgcattcaactcacagagatgaacattcccttagacagagcagatttgaaacactctatttgtgtaatttgcaagtgtagatttcaatcgctttaaggtcaatggcaaaaaaggaaatatctgcgtttcaaaactagacagactcattcccaaaaactgcgttgtgatgtgttcgttaaactcacagagtttaacctttctgttcatagagcagttaggaaacactctgtttgtgaagtctgtaagtggatattcagacctccttgaggccttcgttggaaacgggatttcttcatattctgctagacagaagaattctcagaatcttccttgtgttgtgtgtattcaactcacagagttgaacgatcctttacacagagcagacttgaaacactctttttgtggaatttgcaagtggagatttcaagcgctttgaggccaaaggcagaaaaggaaatatcttcgtttcaaaactagacagaatgattctcagaaactcctttgtgatgtgtgcgttcaactcacagagtttaacctttcttttcatagagcagttaggaaacactctgtttgtaaagtctgcaagtggatattcagacatccttgaggctttcgttggaaacgggatttcttcatattctgccagaaagaagaattcccagtaacttccttgtgttgtgtgtgttcaactcacagagttgaactttcatttacacagagcacatttgaaacactctttttgtggaatttgcaagtggagatttcaagcgctttgaggccaaaggcagaaaaggaaatatcttcgtataaaaactagacagaatcattctcagaaactgctctgcgatgtgtgcgttcaactctcagagtttaacttttcttttcattcagcagtttggaaacactctgtttgtaaagtctgcacgtggatattttgaccacttagaggccttcgttggaaaggggtttttttcctataaggctagccagaagaattcccagtaacttccttgtgttgtgtgcattcaactcacagagttgaacgttcccttagacagagcagatttgaaacactctatttgtgcaatttgcaagtgtagttttcaagctctttaaggtcaacggcagaaaaggaaatatcttggtttcaaaactagacagaatcatttccacaaactgcgttgtgatgtgttcgttcaactcacagagtttaacctttctgttcatagagcagttaggaaacactctgtttgtaaagtctgtaagtggatattctgacatcttgtggccttcgttggaaacgggatttcttcatattctgctagacagaagaattctcagtaacttccttgtgttgtgtgtattcaactcacagagttgaacgatcctttacacagagcggacttgaaacactcgttttgtggaatttgcaagtgcagatttcagccgcgttgaggtcaatggtagaaaaggaaatatcttcgtataaaaactagacagaatgattctcataaactcctttgtgatgtgtgcgttcaactcacagagtttaacctttcttttcatagagcagttaggaaacactctgtttgtaaagtctgcaagtggatattcagacctccttgagtccttcgttggaaacgggatttcttcatattctgctagacagaagaattctcagtaacttccttctgttgtgtgtattcaactgacagagttgaactttcatttagagagagcagatttgaaacactgtttttgtggaatttgcaagtggagatttcaagcgctttggggccaaaggcagaaaaggaaataacttcgtataaaaacttgacagaatcattctcagaaactgctgcgtgatgtgtgcgttcaactctcagagtttaacttttcttttcattcagcggtttggaaacactctgtttgtaaagtctgcacgtggatattttgaccacttagaggccttcgttggaaacgggtttttttcatgtagggctagacagaagaattcccagtaacttccttgtgttgtgtacattcaactcacagagttgaacgttcccttagagcagatttgaaacactctttttgtgcaattggcaagtggagatttcaagcgctttaaggtcaatggcagaaaaggaaatatcttcgtttcaaaactagacagaatcattcccacaaactgcgttgtgaggtgttcgttcaactcacagagtttaacctttcttttcatagagcagttaggaaacagtctgtttgtaaattctgtaagagtatattctgaaatattgtggccttcgttggaaacgggatttcttcatattctgctagacagaagaattctcagtaacttccttgtgttgtgtgtattcaactcacagagttgaacgatcctttccagagagcagacttgaaacactttttgtggaatttgcaagtggagatttctgtcgctttgaggtcaaaggtagaataggaaatatcttcctatagaaactagacagagtgattctcagaaactcctttgtgatgtctgcgttcaactcacagagtttaacctttcttttcatagagcagttaggaaacactctgtttgtaaagtctgcaagtggatattcagacctccttgaggccttcgttgtaaacgggatttctaaatattatgctagacagaagaattctcagtaaattccttgtgttgtgtgtattcaactgacagagttgaactttcatttggagagagcagatttgaaacactgtttttgtggaatttgcaagtggagatttcaagcgctttggggccaaaggcagaaaaggaaatatcttcgtataaaaactagacagaatcattctcagaaaatgctctgtgatgtgtgcgttcaactctcagagtttaacttttgttttcattcagcagtttggaaacactctgtttgtaaagtctgcacgtggatattttgaccacttagaggccttcgttggaaacgggtttttttcatgaaagggtagacagaagaattcccagtaacttccttgtgttgtgtgcattcaactcacagagttgaacgttcccttagacagaggagatttgaaacactctatttgtgcaatttgcaattgtagatttcaagcgctttaaggtcaatggcagaaaaggaaatatcttcgtttcaaaactagacagaatcattcccacaaactgcattgtgatgtgttcgttcaactcacagagtttaacctttcttttcatagagcagttaggaaacagtctgtttgtcaattctgtaagtggatattctgacatcttgtggccttcgttggaaacgggatttcttcatattccgctagacagaagaattctcagtaacttccttgtgttgtgtgtattcaactcacagagttgaacgatcctttacacagagcagacttgtaacactctttttgtggaatttgcaagtggagaattcagccgctttgaagtcaaaggtagaaaaggaaataacttcctataaaaactagacagaagaattcccagtaacttccttgtgttgtgtgtgttcaactcacagagttgaactttcatttacacagagtagatttgaaacactctttttgtggaatttgcaagtggagatttcaagcgctttgaggccaaaggcagaaaaggaaatatcttcgtataaaaactagacagaatcattctcagaaactgctgcgtgatgtgtgcgttaaactctcagagtttaacttttcttttcattcagcggtttggaaacactctgtttgtaaagtctgcacgtggatattttgaccacttagaggccttcgttggaaacgggtttttttcatgtaaggctagacagaagaattcccagtaacttccttgtgttgtgtgcattccactcacagagttgaacgttcccttagacagagcagatttgaaacactctatttgtgcaatttgcaagtgtagatttcaagcgctttaaggtcaatggcagaaaaggaaatatcttcgtttcaaaactagacagaatcattcccacaaactgcgttgtgatgtgttcgttcaactcacagagtttaacctttcttttcatagagcagttaggaaacagtctgtttgtaaattctctaagtggatattctgacatcttgtggccttcgttggaaacgggatttcttcatattctggtagacagaagaattctcagtaacttccttgtgttgtgtgtattcaactcacagagttgaatgatcctttacacagaacagacttgaaacactctttttgtggaatttgcaagtggagatttcagccgctttgaggtcaatggtagaataggaaatatcttcctatagaaactagacagaatgattctcagaaactcctttgtgatgtgtgcgttcaactcacagagtttaacctttctgttcatagagccgttaggaaacacactgtttgtaaagtctgcaagtggatattcagacctctttgaggccttcgttggaaacgggatttcttcatattatgctagacagaagaattctcagtaacttccttgtgttgtgtgtattcaactgacagagttgaactttcatttagagagagaagatttgaaacactgtttttgtggaatttgcaattggagatttcaagcgctttggggccaaatgcagaaaaggatatatcttcgtataaaaactagacagaatgattctcagaaacttctttgtgatgtgtgcgttcaactcacagagtttaaactttcttttcatagagtagttaggaatcactctgtttgtaaagtctgcaagtagatattttgacctctttgaggccttcgttggaaacgggtttttttccagtaaggctagacagaagaattcccagtaacttccttgtgttgtgtacattcaactcacagagttgaacgttcccttagacagagctgatttgaaacactctttttgtgcaattggcaagtggagatttctagcgctttaaggtcaatggcagaaaaggaaatatcttcgtttcaaaactagacagataatcattcccacaaactgcgttgtgatgtgttcgttcatctcacagagtttaacctttcttttcgtagagcagttaggaaacagtctgtttgtaaattctgtaagtggatattctgacatcttgtggccttcgttggaaacgggatttcttcatattctgctagacagaagaattctcagaatcttccttgtgttgtgtgtattcaactcacacagttgaacgatggtttacacagagcagatttgaaacactctttttgtggaatttgcaagtggagatttcagccgctttgaggtcaatggtagaaaaggaaatatcttcgtataaaaactagacagaatgattctcagaaactcctttgtgatgtgtgtgttcaactcacagagtttaacctttcttttcatagagcagttagtaaacactgtttataaagtctgcaagtggatattcagacccctttgaggccttcgttggaaacgggatttcttcatattatgctagacagaagaattcccagtaactttccttgtgttgtgtgtgttcaactcacagagttgaactttcatttacacagagcagatttgaaacactctttttgtggaatttgcaagtggagatttcaagcgctttgaggccaaaggcagaaaaggaaatagtcttcgtttcaaaactagacagaatcattctcagaaactgctctgcgatgtgtgcgttcaactctcaaagtttaacttttcttttcattcagcagtttggaaacactctgtttgtaaagtctgcacgtggataacttgaccacttagaggccttcgttggaaacaggtttttttcctgtaaggctagacagaataattcccagtaacttccttgtgttgtgtacattcaactcacagagttgaacgttcccttagagagagcagatttgaaacactcgttttgtgaaattggcaagtggagatttcaagggctttaaggtcaatggcagaaaaggaaatatcttcgtttcaaaactagacagaatcattcccacaaactgcgttgtgatgtgttcgttcaactcacagagtttaacctttcttttcatagagcagttaggaaacactctgtttgtaaattctgtaagtggatattctgacatcttgtggccttcgttggaaacgggatttcttcatattctgctagacagaagaattctcagtaactgccttgtgttgtgtgtattcaactcacagagttgaacgatcctttacacagagcagacttgaaacactctttttgtggaatttgcaagtggagatttcagccgctttgacgtcaatggtagaataggaaatatcttcctatagaaactagacagaatgattctcagaaactcctttgtggtgtgtgtgttcaactcacagagtttaacctttcttttcatagagcagttagtaaacactctgtttataaagtctgcaagtggatattcagacccctttgaggccttcgttggaaacgggatttcttcatattatgctagacagaagaattctcagtaacttccttgtgttgtgtgtattcaactgacagatttgaactttcatttagagagagtagatttgaaacactgtttttgtggaatttgcaagtggagatttcaagcgctttggggccaaaggcagaaaaggaaatatcttcgtataaaaactagacagaatcattctcagaaactgctgcgtgatgtgtgcgttcacctctcagagtttaacttttcttttcattcagcggtttggaaacactctgtctgtaaagtctgcacgtggatattttgaccacttagaggccttcgttggaaacgggtttttttcatgtaaggctagacagaagaattctcagtaacttccttgtgttgtgtgtattcaactcacacagttgaacgatcctttacacagagcagacttgtaacactccttttgtggaatttgcaagtggagatttcagccgctttgaagtcaaatgtagaaaaggaaatatcttcctataaaaactagacagaatgattctcagaaacccctttgtgatgtgtgcgttcaactcacagagtttaacctttctgttcatagagcagttaggaaacactctgtttgtaaagtctgtaagtggatattctgacatcttgtggccttcgttggaaaagggatttcttcctattctgctagacagaagaattctcagaatcttccttgtgttgtgtgtattcaactcacagagttgaacgatcctttacacagagcagacttgaaacactctttttgtggaatttgcaagtggagatttcagccgctttgaggtccatggtagaaaaggaaatatcttcgtacaaaaactagacagaaatgattctcagaaactcctttgtgatgtgtgtgttcaactcacagagtttcacctttcttttcatagagcagataggaaacactctgtttgtaaagtctgcaagtggatattcagacctctttgaggccttcgttggaaacgggtttttttcatataaggctagacagaagaattcccggtaacttccttgtgttttgtgtgttcaactcacagagttgaactttcatttacacagagcagatttgaaacactctttttgtggaatttgcaagtggagatttcaagcgctttgaggccaaaggcagaaaaggaaatatcttcgtttcaaaactagacagaatcattctcagaaactgctctgcgatgtgtgcgttcaactctcagagtttaacttttctattcattcagcagtttggaaacactctgtttgtaaagtctgcacgtggatattttgaccacttagaggccttcgttggaaacgggtttctttcctgtaaggctagacagaagaattcccagtaacttccttgtgttgtgtacattcaactcacagagttgaacgttcccttagacagagcagatttgaaacactctttttgtgcaattggcaagtggtgatttcagccgctttgaggtcaatggtagaaaaggaaatatcttcgtataaaaactagacagaatgattctcagaaactcctttgtgatgtgtgcgttcaactcacagagtttaacctttcttttcatagagcagttaggaaacactctgtttgtaaagtctgcaaatggatattcagacctccttgaggccttcgttggaaacgggatttcttcatattatgctagacagaagaattctcagtaacttccttgtgttgtctgtattcaactcacagagttcaacgattctttacacagagcagacttgaaacagtctttttgtggaatttgcaagtggagatttcagccgctttgaggtcaattgtagaaaaggaaatatcttcgtataaaaactggacagaatgattctcataaactcctttgtgatgtgtgcgttcaactcacagagtttaacctttcttttcatagagcagttagtaaacactctgtttataaagtctgcaagtggatattcagacccctttgaggccttcgttggaaacgggatttcttcatattatgctagacagaagaattctcagtaacttccttgtgttgtgtgtattcaactgacagagttgaactttcatttagaaagagcagatttgaaacactgtttttgtggaatttgcaagtggagatttcaagcgctttggggccaaaggcagaaaaggaaatatcttcgtataaaaactagacagaatcattctcagaaactgctgcgtgatgtgtgcgttcaactctcaagagtttaacttttcttttcattcagcggtttggaaacactctgtttgtaaagtctgcacgtggatattttgaccacttagaggccttcgttggaaacgggtttttttcatgtaaggctagacagaagaattcccagtaacttccttgtgttgtgtacattcaactcacagagttgaacgttcccttagacagagcagatttgaaacactctttttgtgcaattggcaaatggagatttcaagcgctttaaggtcaatggcagaaaaggaaatatcttcgtttcaaaactagacagaatgattctcagaaactcctttgtgatgtgtgggttcaactcacagagtttaacctttcttttcatagagcagttaggaaacactctgtttgtaaagtctgcaagtggatattcagacatccttgaggctttcgttggaaacgggatttcttcatattctgctagaaagaagaattctcagtaacttccttgtgttgtgtgtattcaactcacagagttgaacgatcctttacacagagcagacttgaaacactctttttgtggaatttgcaagtggatatttcagccgctttgagttcaatggtagaataggaaatatcttcctatagaaactagacagaatgattctcagaaactcctttgtgatgtgtgtgttcaactcacagagtttaacctttcttttcatagagcagttagtaaacactctgtttataaagtctgcaagtggatattcagacccatttgaggccttcgttggaaacgggatttcttcatattatgctagacagaagaattcccagtaacttcccttgtgttgtgtgtgttcaactcacagagttgaactttcatttacacagagcagatttgaaacactctttttgtgcaatttgcaagtggagatttcaagcgctttgaggccaaaggcagaaaaggaaatatcttcgtttcaaaactagacagaatcattctcagaaactgctgcgtgatgtgtgcgttcaactctcagagtttaacttttcttttcattcagcggtttggaaacactctgtttgtaaagtctgcacgtggatattttgacgacttagaggccttcgttggaaacgggtttttttcatgtaaggctagacagaagaattcccagtaacttccttgtgttgggtgcattcaactcacagagttgaacgttcccttagacagagcagatttgaaacactctatttgtgcaatttgcaagtgtagatttcaagcgctttaaggtcaatggaagaaaaggaaatatcttcgtttcaaaactagacagaatcattcccacaaactgcgttgtgatgtgttcgttcaactcacagagtttaacctttctgttcatagagcagttaggaaacactctgtttttaaagtctgtaagtggatattctgacatcttgtggccatcgttggaaacgggatttcttcatattctgctagacagaagaattctcagtaacttccttgtgttgtgtgtattcaactcacagagttgaacgatcctttacacagagcagacttgaaacactcgttttgtggaatttgcaagtggagatttcagctgctttgaggtcaatggtagaaaaggaaatatcttcgtataaaaactagacagaatgattctcagaaactcctttgtgatgtaagcgttcaactcacagagtttaacctttctttacatagagcagttaggaaacactctgtttgtaaagtctgcaagtggatattcagacctccttgaggccttcgttggaaacgggatttcttcatattatgctagacagaagaattccgagtaacttccttgtgttgtgtgtgttcaactcacagagttgaactttcatttacacagagcagatttgaaacactctttttgtggaatttgcaagtggagatttcaagcgctttgaggccaaaggcagaaaaggaaatatcttcgtataaaaactagacagaatcactctcagaaactgctctgcgatgtgtgcgttcaactctcagagtttaacttttcttttcattcagcagtttggaaacactctgtttgtaaagtctgcacgtggataacttgaccacttagaggccttcgttggaaacgggtttttttcctgtaaggctagacagaagaattcccagtaacttccttgtgttgtgtacattcaactcacagagttgaacgttcccttagacagagcagatttgaaacactctttttgtgcaattggcaaatggagatttcaagcgctttaaggtcaatggcagaaaaggaaatatcttcgtttcaaaactagacagaatcattcccacaaactgcgttgtgatgtgtacgttcaactcacagagtttaacctttctgttcatagagcagttaggaaacacgctgtttgtaaagtctgtaagtggatattctgacatcttgtggccttcgttggaaacgggatttcttcatattctgctagacagaagaattctcagtaccttccttgtgttgtgtgtattcaactcacagagttgaacgatcctttacacagagcagacttgtaacactctttttgtggaatttgcaagtggagatttcagccgctttgaagtcaaaggtagaaaaggaaatatcttcctataaaaactagacagaatgattctgagaaactcgtttgtgatgtgtgcgttcaactcacagagtttaacctttcttttcatagagcagttaggaaacactctgtttgtaaagtctgcaagtggatattcagacctccttgaggccttcgttggaaacgggatttcttcatattatgctagacaaaagaattctcagtaacttccttgtgttgtgtgtattcaactgaaagagttgaactttcatttagagagagcagatttgaaacactgtttttatggaatttgcaagtggagatttcaagcgctttggggccaaaggcagaaaaggaaatatcttcgtataaaaactagacagaatcattctcagaaactgctgcgtgatgtgtgcgttcaactctcagagtttaacttttcttttcattcagcggtttggaaacactctgtttgtaaagactgcaggtggatattttgaccacttagaggccttcgttggaaacgggttttttttcatgtaaggctagacagaagaattcccagtaacttccttgtgttgtgtgcattcaactcacagagttgaacgttcccttagacagagcagatttgaaacactctatttgtgcaatttgcaagtgtagatttcaagcgctttaaggtcaatggcagaaaaggaaatatcttcgtttcaaaactagacagaatcattcccacaaactgcgttgtgatgtgttcgttcaactcacagagtttaacctttccgttcatagagcagttaggaaacactctctaaagtctgtaagtggatattcagacctccttgaggtcttcgttggaaacgggatttcttcatattctgctagacagaagaattctcagtaacttccttgtgttgtgtgtattcaactcacagagttgaacgatcctttacacagagcagacttgaaacactctttttgtggaatttgcaagtggagatttcagccgctttgaggtcaatggtagaaaagaaaatatcttcgtataaagactagacagaatgattctcagaaactcctttgtgatgtgtgcgttgaactcacacagtttaacctttcttttcatagagcagttaggaaacactctgtttgtaaagtctgcaagtggatattcagacctccttgaggccttcgttggaaacgggatttcttcatattatgctagacagaagaaatcccagtaacttccttgtgttgtgtgtgttcaactcacagagttgaactttcatttacacagagcagatttgaaacactctttttgtggaatttgcaagtggagatttcaagcgctgtgaggccaaaggcagaaaaggaaatatcttcgtataaaaactagacagaatcattctcagaaactgctctgcgatgtgtgcgttcaactctcagagtttaacttttcttttcattcagcagtttggaaacactctgtttgtaaagtctgcacgtggatatttcgaccacttagaggccttcgttggaaacgggtttctttcctgtaaggctagacagaagaattcccagtaacttccttgtgttgtgtacattcaactcacagagttgaacgttcccttagacagagcagatttgaaacactctttttgtgcaattggcaagtggagatttcaagcgctttgaggtcaatggcagaaaaggaaatatcttcgtttcaaactagacagaatcattcccacaaactgcgttgtgatgtgttcgttcaactcacagagtttaacctttcttttcatagatcagttaggaaacagtctgtttgtcaattctgtaagtggatattctgacatcttgtggccttcgttggaaacgggatttcttcatattctgctagacagaataattctcagtaacttccttgtgttgtgtgcattcaactcacagagttgaacgatcctttacagagagcagagttgaaacactttttgtggaatttgcaagtggagatttcagccgctttgaggtcaaaagtagaataggaaatatcttcctatagaaactagacagaatgattctcagaaactcctttgtgatgtgtgtgttcaactcacagagtttaacctttcttttcatagagcagttagtaaacactctgtttatatagtctgtaagtggatattctgacattttgtggccttggttggaaatgggatttcttcatattctccaagacagaagaattcccagtaacttccttgtgttgtgtgtgttcaactctgtgagttgaactttcatttacacagagcagatttgaaacactctttttgtggaatttgcaagtggagatttcaagcgctttgaggccaaaggcagaaaaggaaatatcttcgtataaaaactagacagaatcattctcagaaactgctgcgtgatgtgtgcgttcaactctcagagtttaacttttcttttcattcagcggtttggaaacactctgtttgtaaagtctgcacgtggatattttgaccacttagaggccttagttggaaacgggttttttgcatgtaaggctagacagaagaattcccagtaacttcattgtgttgtgtgaattcaactcacagagttgaacgttcccttagacagagcagatttgaaacactctatttgtgcaatttgcaagtgtagatttcaagcgctttaaggtcaatggcagaaaaggaaatatcttcgtttcaaaactagacagaatcattcccacaaactgcgttgtgatgtgttcgttcaactcacagagtttaacctttctgttcatagagcagttaggaaacactctgtttgtaaagtctgcaagtgggtattcagacctccttgaggccttcgttggaaacgggatttcttcatattctgctagacagaagaactctcagtaacttccttgtgttgtgtgtattcaactcacagagttgaacgatcctttacacagagcagacttgaaacactctatttgtggaatttgcaagtggagatttcagccgctttgagttcaatggtagaataggaaatatcttcctatagaaactagacagaatgattctcagaaactcctttgtgatatgtgcgttcaactcacagagttaaacctttcttttcatagagcagttgggaaacactctgtttgtaaagtctgcaagtggatattcagacttctttgaggccttcgttggaagcgggatttcttcatattctgctagacagaagaattctcagtaacttccttgtgttgtgtgtattcaactcacagagttgaacgatcctttacacagagcggacttgaaacacactttttgaggaatttgcaagtggagatttcagccgcgttgaggtcaatggtagaaaaggaaatatcttcgtataaaaactagacagaatcattctcagaaactgctgcgtgatgtgtgcgttcaactctcagagtttaacttttcttgtcattcagcggtttggaaacactctgtttgtaaagtctgcacgtggatattttgaccacttagtggccttcgttggaaacgggttttttttcatgtaaggctagacagaagatttcccagtaaattccttgtgttgtgtacattcaactcacagagttgaacgttcccttagacagagcagatttgaaacactctttttgtgcaattggcaagtggagatttcaagcgctttaaggtcaatggcagaaaaggaaatatcttcgtttcaaaactagacagaatcattcccacaaactgcgttgtgatgtgtttgttcaactcacagagtttaacctttctgttcatagagcagttaggaaacactctgtttgtaaagtctgcaagtggatattcagacctccttgaggccttcgttggaaacgggatttcttcatattctgctagacagaagaattctcagaatcttcccttgtgttgtgtgtattcaactcacagagttgaacgatcctttacacagagcagacttgaaacactctttttgtggaatttgcaagtggagatttcagccgctttgaggtccatggtagaaaaggaaatatcttcgtataaaaactagacagaatgattctcagaaactcctttgtgatgtgtgcgttcaactcacagagtttaacctttcttttcatagagcagttaggaaacactctgtttgtaaagtctgcaagtggatattcagacctctttgaggccttcgttggaaacgggttttttacatataaggcttgacagaagaattcccagtaacttccttgtgttgtgtgtgttcaactgacagagttgaactttcatttacacagagcagatttgaaacactctttttgtggaatttgcaagtggagatttcaagcgctttgaggccaaaggcagaaaaggaaatatcttcgcataaaaactagacagaatcattctcagaaaatcctctgtgatgtgtgcgttcaactctcagagtttaacatttcttttcattcagcagtttgaaaacactctgtttgtaaagtctgcacgtggatattttgaccacttagaggccttcgttggaaacgggtttttttcatgtaagtgtagacagaagaattcccagtaacttccttgtgttgtgtgcattcaactcacagagttgaacgttcccttagacagagcagatttgaaacagtctatttgtgtaatttgcaagtgtagatttcaagcgctttcaggtcaacggcagaaaaggaaatatcttcgtttcaaaactagacagaatcattcccacaaactgcgttgtgatgggttcgttcaactcacagagtttaacctttcttttcatagagcagttaggaaacagtctgtttgtcaattctgtaagtggatattctgacatcttgtggccttcgttggaaacgggatttcttcatattctgctagacagaagaattctcagtgacttccttgtgttgtgtgtattctactcacagagttgaacgatcctttacacagagcagacttgaaacactctttttgtggaatttgaaagtggagatttcagccgctttgaggtcaatggtagaaaaggaaatatcttcgtataaagactagacagaatgattctcataaactcctttgtgatgtgtgcgttcaactcacagagtttaacttttcttttcatagagcagttaggaaacactctgtttgtaaagtctgcaagtggatattcagacctctttgaggccttcgttggaaacgggatttcttcatattatgctagacagaagaattcccagtaacttccttgagttgtgtgtgttcaactcacagagttgaacattcatttacccagagcagatttgaaacactctttttgtggaatttgcaagtggagatttcaagcgctttgaggccaaaggcagaaaaggaaatatcttcgtttcaaaactagacagaatcattctcagaatctgctctgcgatgtgtgcgttcaactctcagagtttaacttttcttttcattcagcagtttggaaacactctgtttgtaaagtctgcacgtggatattttgaccacttagaggccttcgttggaaacgggtttttttcctgtaaggctagacagaagaattcccagtaacttccttgtgttgtgtacggttcaactcacagagttgaacgttcccttagacagagcagatttgaaacactctttttgtgcaattggcaagtggagatttcaagcgctttaaggtcaatggcagaaaaggaaatatcttcgtttcaaaactagacagaatcattcccacaaactgtgttgtgatgtgttcgttcaactcacagagtttaacctttctgttcatagagcagttaggaaacactctgtttgtaaagtctgtaagtggatattctgacatcttgtggccttcgttggaaacgggatttcttcatattctgctagacagaagaattctcagtaacttccttgtgttgtgtgtattcaactcacagagttgaacgatcctttacacagagcagacttgaaacactctttttgtggaatttgcaagtggagatttcagccgctttgaggtcaatagtagaaaaggaaactatcttcatataaagactagacagaatgattctcagaaactcctttgtgatgtgtgcgttcaactcacagagtttaacttttcttttcatagagcagttaggaaacactctgtttgtaacgtctgcaagtggatattcagacctctttgaggccttcgttggaaacgggatttcttcatattatgctagacagaagaattctcagtaacttccttgtgttgtgtgtattcaactcacagagttgaacgatcctttacacgagagcagagcttgaaacactctttttgtggaatttgcaagtggagatttcatgccgctttgaggtcagtggtagaaaaggaaatatcttcgtataaagactagacagaatcattctcagaaactgctctgcgatgtgtgcgttcaactctcagagtttaactttgcttttcattcagcagtttggaaacactctgtttgtaaagtctgcacgtggatattttgaccacttagaggccttcgttggaaacgggtttctttcctgtaaggctagacagaagaattcccagtaacttccttgtgttgtgtacattcaactcacagagttgaacgttcccttagacagagcagatttgaaacactctttttgtgcaattggcaagtggtgattttagccgctttgaggtcaatggtataaaaggaaatatcttcgtattaaaactagacagaatcattcccacaaactgcgttgtgaggtgttcggtaaactcacagagtttaacctttcttttcatagagcagttaggaaacagtctgtttgtaaattctgtaagtggatattctgacatcttgtggccttcgttggaaacgggatttcttcatattctgctatacagaataattctcagtaacttccttgtgttgtgtgtattcaactcacagagttgaacgatcctttacagagagcagacttgaaacactctttttgtggaatttgcaagtggagatttcagccgctttgaggtcaaaggtagaataggaaatatgcttcctacagaaaatagacagaatgattctcataaactcctttgtgatgtgtgcgttcaacacacagagtttaacctttctgttcatagagcagttaggaaacactctgtttgtaaagtctgtaagtgcatattctgacatcttgaggccttcgttggaaacgggatttcttcatattctgctagacagaagaattcccagtaacttccttgtgttgtgtgtgttcaactcacagagttgaactttcatttacacagagcagatttgaaacactctttttgtggaatttgcaagtggagatttcaagcgctttgaggccacaggcagaaaaggaaatatcttcgtttcaaaactagacagaatcattctcagaaactgctgcgtgatgtgtgcgttcaactctcagagtttaacttttctagtcattcagcggtttggaaacactctgtttgtaaagtctgcacgtggatattttgaccacttagaggccttcgttggaaacgggattttttcatgtaaggctagacagaagaattctcagtaacttccttgtgttgtgtgtattcaactcacagagttgaacgaatcctttacagagagcagacttgaaacactctttttgtggaatttgcaagtggagatttcagccgctttgaggtcaatggtagaataggaaatatcttcctatagaaaatagacagaatgattctcagaaactcctttgtgatgtgtgcgttcacctcacagagattaacctttcttttcatagagcagttaggaaacactctgtttgtaaagtctgcaagtggatattcagacctctttgaggccttcgttggaaacgggatttcttcatattctgctacacagaagaattctcagtaacttccttgtgttgtgtgtattcaactcacagagttgaacgatcctttacacagagcagtcttgaaacactctttttgtggaatttgcaagtggagatttcagccgctttgaggtcaatagtagaaaaggaaatatcttcgtagaaaaactagacagaatgattctcagaaactcctttgtgatgtgtgcgttcaactcacagagtttaacctttcttttcatagagcagttaggaaacactctgtttgtaaagtctctaagtggatattcagacctctttgaggccttcgttggaaacgggtttttttcatataaggctagacagaagaattcccagtaacttccatgtgttgtgtgtgttcaactcacagagttgaactttcatttacacagagcagatttgaaacactctttttgtggaatttgcaaatggagatttcaagcgctttgaggccaaaggcagaaaaggaaatatcttcgtataaaaactagacagaatcattctcagaaactgctatgcgatgtgtgcgttcaactctctgagtttaacttttcttttcattcagcagtttggaaacactctgtttgtaaagtctgcacgtggataatttgaccacttagaggtcttcgttggaaacgggtttttttcatgtaagggtagacagaagaattcccagtaacttccttgtgttttgtgcattcaactcacagagttgaacgttcccttagacagagcagatttgaaacactctatttgtgcaatttgcaagtgtagatttcaagcgctttaaggtcaatggcagaaaaggaaatatcttcgtttcaaaactagacagaatcattcccacaaactgtgttgtgatgtgttcgttcatctcacagagtttaacctttcttttcatagagcagttaggaaacactatgtttgtaaattctgtaagtggatattctgacatcttgtggccttcgttggaaacgggatttcttcatattctgctagacagaagaattctcagtaacttccttgtgttgtgtgtattcaactcacagagttgaacgatcctttacagagagcagacttgaaacactctttttgtggaatttgcaagtggagatttcaggggttttgaggtcaatggtagaaaaggaaatatcttcgtataaagactagacagaatgattctcagaaactcctttgtgatgtgtgcgttcaactcaaagagtttaacttttcttttcatagagcagttaggaaacactctgtttgtaaagtctgcaagtggatattcagacctctttgaagccttcgttggaaacgggatttcttcatattatgctagacagaagaattcccagtaacttccttgtgttgtgtgtgttcaactcacagagttgaactttcatttacacagagcagatttgaaacactctttttgtggaatttgcaaatggagatttcaagcgctttgaggccaaaggcagaaaaggaaatatctttgtataaaaactagacagaatcattctcagaaactgctctgcgatgtgtgcgttcaactctcaaagtttaactttgcttttcattcagcagtttggaaacactctgtttgtaaagtctgcacgtggataatttgaccacttagaggccttcgttggaaacgggtttttttcatgtaaggctagacagaagaattcccagtaacttccttgcgttgtgtacattcaactcacagagttgaacgttcccttagacagagcagatttgaaacactctttttgtgcaattggcaagtggagatttcaagcgctttaaggtcaatggcagaaaaggaaatatcttcgtttcaaaactagacagaatgattctcataaactcctttgtgatgtgtgcgttcaactcacagagtttaacctttcttgtcatagagcagttaggaaacactctgtttgaaaagtctgcaagtggatattcagacctccttgaggccttcgttggaaacgggatttcttcatattctgctagacagaagaattctcagtaacttccttgtgttgtgtgtattcaactcacagagttgaacgatcctttacacagagcagacttgaaacactctttttggggaatttgcaagtggagatttcagccgctttgaggtcaatggtagaaaaggaaatatcttcgtataaagactagacagaatgattctcagaaactcctttgtgatgtgtgcgttcaactcacagagtttaacttgtcttttcatagagcagttaggaaacactctgtaaagtctgcaagtggatattcagacctctttgaggccttcgttggaaacgggatttcttcatattatgctagacagaagaattctcagtaacttccttgtgttgtgtgtattcaactgacagagttgaaccttcatttagagagagcagatttgaaacactgtttttgtggaatttgcaagtggagatttcaagcgctttggggccaaaggcagaaaaggaaatatcttcgtataaaaactagacagaatcattctcagaaactgctctgcgatgtgtgcgttcaactctcagagtttaacttttcttttcattcagcagtttggaaacactctgtttgtaaagtctgcacgtggatattttgacctcttagaggccttcgttggaaacgggtttttttcctgtaaggctagacaagaagaattgccagtaacttccttgtgttgtgtgcattcaactcacagagttgaacgttcccttagacagagcagatatgaaacactctatttgtgcaatttgcaagtgtagatttcaagcgctttaaggtcaatggcagaaaaggaaatatcttcgtttcaaaactagacagaatcattctcagaaactgctctgcgatgtgtgcgttcaactctcagagtttaacttctcttttcattcagtagtttggaaacactctgtttgtaaagtctgcacgtggataacttgaccacttagaggccttcgttggaaacgagtttttttcatgtaaggctagacagaagaattctcagtaacttccttgtgttgtgtgtattcatctcacagagttgaacgatcctttacacagagcagacttgtaaaactctttttgtggaatttgcaagtggagatttcagccgctttgaagtcaaaggtagaaaaggaaatatcttcctataaaaactagacagaatgattctcagaaactcctttgtgatgtgtgtgttcaactcacagagtttaacctttcttttcatagagcagttaggaaacactctgtttgtaaagtctgcaagtggatattctgacctctttgaggccttcttcggaaacgggtttttttcatataaggctagacagaagaattcccagtaacttccttgtgttgtgtgtgttcaactgacagagttgaactttcatttacacagagcagatttgaaacactctttttgtggaatttgcaggtggagatttcaagcgctttgaggccaaaggcagaaaaggaaatatcttcgtataaaaactagacagaatcattctcagaaactgctgcgtgatgtgtgcgttcaactctcagagtttaacttttcttttcattcagcggtttggaaacactctctttgtaaagtctgcacgtggatattttgaccacttagaggccttcgttggaaacgggtttttttcatgtaaggctagacagaagaattcccagtaacttccttgtgttgtgtacattcaactcacagagttgaacgttcccttagacagagcagatttgaaacactctttttgtgcaattggcaaatggagatttcaagcgctttaaggtcaatggcagaaaaggaaatattcttcgtttcaaaactagacagaatgattctcataaactcctttgtgatgtgtgcgttcaacacacagagtttaacctttctgttcatagagctgttaggaaacactctgtttgtaaagtctgtaagtggatattctgacatcttttggccttcgttggaaacgggatttcttcatattctgctagacagaagaattctcagtaacttccttgtgttgtgtgtattcaactcacagagttgaacgatcctttacacagagcagacttgtaacactctttttgtggaatttgcaagtggagatttcagccgctttgaggtcaaaggtagaaaaggaaatatcttcctataaaaactagacagaatgattctcagaaactcctttgtgatgtgtgcgttcaactcacagagtttaacctttcttttcatagagcagttaggaaacactctgtttgtaaagtctgcaagtggatattcagacctccttgaggccttcgttggaaatgggatttcttcatattctgctagacagaagaattcccagtaacttccttgtgttgtgtgtgttcaactcacagagttgaactttcatttacacagagcagatttgaaacactctttttgtggaatttgcaagtggagatttcaagcgctttgaggccaaaggcagaaaaggaaatatgttcgtttcaaaactagacagaatcattctcagaaactgctctgcgatgtgtgcgttcaactctcagagtttaacttttcttttcattcagcagtttggaaacactgtgtttgtaaagtctgcacgtggatattttgaccacttagaggccttcgttggaaacgggttttttttcctgtaaggctagagagaagaattcccagtaacttccttgtgttgtgtgcattcaactcacagagttgaacgttcccttagacagagcagatttgaaacactctatttgtgcaatttgcaagtgtagatttcaagcgctttaaggtcaatggcagaaaaggaaatatcttcgtttcaaaactagacagaatcattcccacaaactgcgttgtgacgtgttcgttcaactcacagagtttaacctttctgttcatagagcagttaggaaacactctgtttgtaaagtctgtaagtggatattctgacatcttgtggccttcgttggaaacaggatttcttcgaattctgctagacagaagaattctcagtaacttccttgtgttgtgtgtattcaactcacagagttgaacgatcctttacacagagcagatttgtaacactctttttgtggaatttgcaagtggagatttcagccgctttgaagtcaaaggtagaaaaggaaataacttcctataaaaactagacagaatgattctcagaaactcctttgtgatgtgtacgttcaactcacagagtttaacctttcttttcatagagcagttaggaaacactctgtttgtaaagtctgcaagtggatattgagacctctttgaggccttcgttggaaacgggtttttttcatgtaaggctagacagaagaattctcagtaacttccttgtgttgtgtgtattcaactgacagagttgaactttcatttagagagagcagatttgaaaccctgttttgtggaatttgcaagtggagatttcaagcgctttggggccaaaggcagaaaaggaaatatcttcgtataaaaactagacagaatgattctcagaaactgctctgcgatgtgtgcgttcacctctcagagtttaacttttcttttcattcagcagtttggaaaccctctgtttgtaaagtctgcacgtgcataatttgaccacttagaggccttcgttggcaacgggtttttttcatgtaaggctagacagaagaattcccagtaacttcccttgtgttgtgtacatttaactcacagagttgaacgttcccttagacagagcagatttgaaacactctttttgtgcaattggcaagtggagatttcaagcgctttaaggtcaatggcagaaaaggaaatatcttattttcaaaactagacagaacgattctcagaaactcctttgtgatgtgtgcgttcaactcacagagtttaacctttcttttcatagagcagttaggaaactgtctgtttgtaaagtctgcaagtggatattcagacctctttgaggccttcgttggaaacgggatttcttcatattctgctagacagaagaattctcagtaacttccttgtgttgtgtgtattgaactcgcagagttgaacgatcctttacagagagcagacttgaaacactctttttgtggaatttgcaagtggagatttcagccgctttgaggtcaatggtagaaaaggaaatatcttcgtataaagactagacagaatgattctcagaaactcctttgtgatgtgtgcgttcaacacacagagtttaacttttcttttcatagagaagttagtaaacactctgtttataaagtctgcaagtggatattcagacccctttgaggccttcgttggaaacgggatttcttcatattatgctagacagaagaattccaagtaacttccttgtgttgtgtgtgtccaactcacagagttgaactttcatttacacagagcagatttgaaacactctttttgtggaatttgcaaatggagatttcaagcgctttgaggccaaaggcagaaaaggaaatatcttcgtataaaaaccagacagaatcattctcagaaactgctcgtgcgatgtgtgcgttcgactctcagagtttaacttttcttttcattcagcagtttggaaacactctgtttgtaaagtctgcacgtggataatttgaccacttagaggccttcgttggaaacgggtttttttcatgtaaggctagacagaagaattcccagtaacttccttgtgttgtgtacattcaactcacagagttgaaccgttcccttagacagagcagatttgaaacactctttttgtgcaattggcaagtggagatttcaagcgctttaaggtcaatggcagaaaaggaaatatcttcgtttcaaaactaggcagaatgattctcagaaactcctttgtgatgtgtgcgttcaactcacagagtttaacctttcttttcatagagcagttaggaaacgctctgtttgtaaagtctgcaagtggatattcagacatccttgaggctttcgttggaaacgggatttcttcatattctgctagaaagaagaattctcagtaacttccttgtgttgtgtgcattcaactcacagagttgaacgatcctttacacagagcagacttgaaacactctttttgtggaatttgcaagtggagatttcagccgctttgaggtcaatggtagaaaaggatactatcttcgtataaagactagacagaatgattctcagaaactcctttgtgatgtgtgcgttcaactcacagagtttaacctttcttttcatagagcagttaggaaacactctgtttgtaaagtctgcaagtggatattcagacatctttgaggctttcgttggaaacgggatttcttcatattctgctagacagaagaattctcagtaacttccttctgttgtgtgtattcaactcacagagttgaacgatcctttacacagagcagacttgaaacactctttttgtggaatttgcaagtggagatttcagccgctttgaggtcaatggtagaataggaaatatcttcctatagaaactagacagaatcattctcagaaactgctctgcgatgtgtgcgttcaactctcagagtttaacttttcttttcattcagcagtttggaaacactctgtttgtaaattctgcacgtggataacttgaccacttagaggccttcgttggaaacgggtttttttcctgtaaggctagacagaagaattcccagtaacttccttgtgttgtgtacattcaactcacagagttgaacgttcccttagacagagcagatttgaaacactctttttgtgcaattggcaaatggagatttcaagcgctttaaggtcaatggcagaaaaggaaatatcttcgtttcaaaactagacagaatcattcccacaaactgcgttgtgatgtgttcgttcaactcacagagtttaacctttctgttcatagagcagttaggaaacactgtgtttgtaaagtctgtaagtggatattctgacatcttgtggccttcgttggaaacgggatttcttcattttctgctagacagaagaattctcagtaacttccttgtgttgtgtttattcaactcacagagttgaacgatcctatacacagagcagacttgaaacactctttttgtggaatttgcaagtggagatttcagccgctttgaggtcaatggtagaataggaaatatcttcctatagaaactagacagagtgattctcagaaactcctttgggatgtctgcgttcaactcacagagtttaacctttcttttcatagagcagttaggaaacactctgtttgtaaagtctgcaagtggatattcagacctccttgaggccttcgttggaaacgggatttcttcatattctgctatacagaagaattctcagaaacttccttgtgttgtgtgtattcaactcacagagttgaacgatcgtttacacagagcagacttgagacactctttttgtggaatttgtaagtggagatttcagccgctttgaggtcaatggtagaaaaggaaatatcttcatataaagactagacagaatcattctcagaaactgctctgcgatgtgtgcgttcaactctcagagtttaacttttcttttcattcagcagtttggaaacactctggttgtaaagtctgcacgtggataacttgaccacttagaggccttcgttggaaacgggtttttttcctgtaaggctagacagaagaattcccagtaacttccttgtgttgtgtacattcaactcacagagttgaacgttcccttagacagagcagatttgaaacactctttttgtgcaattggcaagtggagatttcaagcgctttgaggtcaatggcagaaaaggaaatatcttcgtttcaaaactagacagaatgattctcagaaactcctttgtgatgtgtgagttcaactcacagagtttatcctttcttttcatagagcagttaggaaacactctgtttgtaaagtgtgcaagtggatattcagacctctttgaggccttcgttggaaacgggatttcttcatattctgctagacagaagaattctcagtaacttccttgtgttgtgtgcattgaactcacagagttgaacgatcctttacacagggcagacttgaaacactctttttgtggaatttgcaagcggagatttcagcctctttgaggttaatggtagaaattgaaatatcttcgtatagaaactagacaaaatgattctcagaaactcctttgtgatgtgtgcgttcaactcacagagtttaacttttcttttcatagagcagttaggaaacactctgtttgtaaagtctgcaagtggatattcagacctctttgaggccttcgttggaaacgggattcttcatattatgctagacagaagtattctcagtaacttccttgtgttgtgtgtattcaactgacagagttgaactttcatttagagagagcagatttgaaacactgtttttgtggaatttgcaagtggagatttcaagcgctttggggccaaaggcagaaaaagaaatatcttcgtataaaaactagacagaatcattctcagaaactgctctgcgatgtgtgcgttcaactctcagagtttaacttttcttttcattcagcagtttggaaacactctgtttgtaaagtctgcacgtggatattttgagcacttagaggccttcgttggaaacgggtttttttcctgtaaggctagacagaagaattcccagtaacttccttgtgttgtgtacattcaactcacagagttgaacgttcccttagacagagcagatttgaaacactctttttgtgcaattggcaaatggagatttcaagcgctttaaggtcaatggcagaaaaggaaatatcttcgtttcaaaactagacagaatcattcccacaaactgcgttgtgatgtgttcgttcaactcacagagtttaacctttcttttcatagagcagttaggaaacagtctgtttgtcaattctgtaagtggatattctgacatcttgtggccttcgttggaaacgggatattcttcatattctgctagacagaagaattctcagtaacttccttgtgttgtgtgtattcaactcacagagttgaacgatcctttacacagagcagacttgaaacactctttttgtggaatttgcaagtggagatttcaggcgctttgaggtcaatagtagaaaaggaaatatcttcgtagaaaaactagacagaatgattctcagaaactcctttgtgatgtgtgtgttcaactcacagagtttaacctttcttttcatagagcagttagtaaacactctgtttataacgtctgcaagtggatattcagacccctttgaggccttcgttggaaacgggatttcttcatattatgctagacagaagaattctcagtaacttccttgtgttgtgtgtattcaactgacagagttgaactttcttttagagagagcagatttgaaacactgtttttgtggaatttgcaagtggagatttcaagcgctttggggccaaaggcagaaaaggaaatatcttcgtataaaaactagacagaatcattctcagaaactgctctgcgatgtgtgcgttcaactctcagagtttaacttttcttttcattcagcagtttggaaacactctgtaaactctgcatgtggatattttgaccacttagaggccttcgttggaaacgggtttttttcctgtaaggctagacagaagaattcccagtaacttccttgtgttgtgtacattcaactcacagagttgaacgttcccttagacagagcagatttgaaacactctttttgtgcaattggcaagtggtgatttcagccgctttgaggtcaatggtagaaaaggaaatatcttcgtataaaaactagacagaatgattctcagaaacttcattgtgatgtgtgcgttcaactcacagagtttaacctttcttttcatacagcagttaggaaacactctgtttgtaaactctgcaagtcgatattcacacctctttgaggccttcgttggaaacgggatttcttcatactatgctagacagaagaattctcagtaacttccttgtgttgtgtgtattcaactcacagagttgaacgatcctttacacagagcagacttgtaacactctttttgtggaatttgcaagtggagatttcagccgctttgaagtcaaaggtagaaaaggaaataacttcctataaaaactagaaagaatgattctcagaaactcctttgtgatgtgtgtgttcaactcacagagtttaacctttcttttcatagagcagttagtaaacactctgtttataaagtctccaagtggatattcagacccctttgaggccttcgttggaaacgggatttcttcatattatgctagacagaagaattcccagtaacttctttgtgttgtgtgtgttcaactcacagagttgaactttcatttacacagagcagatttgaaacactctttttgtggaatttgcaagtggagatttcaagcgctttgaggccaaaggcagaaaaggaaatatctttgtataaaaactagacagaatcattctcagaaactgctctgcgatgtgtgtgttcaactctcagagtttaacttttcttttcattcagcagtttggaaacactctgtttgtaaagtctccacgtggataatttgaccacttagaggccttcgttggaaacgggtttttttcatgtaaggctagacagaagaattctcagaatcttccttgtgttgtgtgtattcaactcacacagttgaacgacggtttacacagagcagatttgaaacactctttttgtggaatttgcaagtggagatttcagctgctttgaggtcaatggtagaaaaggaaatatcttcgtataaaaactagacagaatgattctcagaaacttctttgtgatgtgtgcgttcaactcacagagtttaacctttcttttcatagagcagttaggaaacactctgtttgtaaactctgcaagtggatattcagacctttttgaggccttcgttggaaacgggatttcttcatactgtgctagacagaataattctcagtaacttccttgtgttgtgtgtattcaactcacagagttgaaggatcctttacagagagcaggcttgaaacactctttttgtcgaatttgcaagtggagatttcagccgctttcaggtcaatggtagaataggaagtatcttcttatagaaactagacagaatgattctcagaaactcttttgtgatgtgtgcgttcaactcacagagtttaacctttcttttcatagagcagttaggaaacactctgtttgtaaaggctgcacgtggatatttggacttctttgaggccttcattggaaacgggtttttttcatgtaaggctagacagaagaattcccagtaacttccttgtgttgtgtgtgttcaaatcacagagttgaactttcatttacacagagcagatttgaaacactctttttgtggaatttgcaaatggagatttcaagcgctttgaggccaaaggcagaaaaggaaatatcttcgtataaaaactagacagaatcattctcagaaactgctctgcgatgtgtgcgttcaactctcagagtttaacttttcttttcattcagcagtttggaaacactctgttcgtaaagtctgcacgtggataacttgaccacttagaggccttcgttggaaacgggtttttttcctgtaaggctagacagaagaattcccagtaacttccttgtgttgtgtgcattcaactcacagagttgaacgttcccttagacagagcagatttgaaacactctgtgcaatttgcaagtgtagatttcaagcgctttaaggtcaacggcagaaaaggaaatatcttcgtttcaaaactagacagaaatcattcccacaaactgcgttgtgatgtgttcgttcaactcacagaagtttaacctttcttttcatagagcagttaggaaacagtctgtttgtaaattctgtaagtggatattctgacatcttgtggccttcgttggaaacgggatttcttcatattctgctagacagaagaattctcagtaacttccttgtgttgtgtgtattcaactcacggagttgaacgatcgtttacacagagcagacttgaaacactctttttgtggaatttgcaagtggagatttcagccgcgttgaggtcaatggtagaaaaggaaatatcttcgtataaaaactagacagaatgattctcagaaacttcattgtgatgtgtgcgttcaactcacagagtttaacctttcttttcatagagcagttaggaaacactctgtttgtaaactctgcaagtggatattcagacctctttcaggccttcgttggaaacgggatttcttcatactgtgctagacagaagatttcccagtaacttccttgtgttgtgtgtgttcaactcacagagttgaactttcatttacacagagcagatttgaaacactctttttgtggaatttgcaaatggagatttcaagcgctttgaggccaaaggcagaaaaggaaatatcttcgtataaaaactagacagaatcattctcagaaactgctctgcgatgtgtgcgttcaactctcacagtttaacttttcttttcattcagcagtttggaaacactctgtttgtaaagtctgcacgtggataatttgaccacttagaggcctttgttggaaacgggttattttcatgtaaggctagacagaagaattcccagtaacttccttgtgttgtgtgcaatcaaatcacagagttgaacgttcccttagacagagtagatttgaaacactctatttgtgcaatttgcaagtgtagatttcaagcgctttaaggtcaaaggcagaaaaggaaatatcttcgtttcaaaactagacagaacgattctcagaaactcctttgtgatgtgtgcgttgaactcacagagtttaacctttcttttcatagagcagttaggaaacactctgtttgtaaagtctgcaagtggatattcagacctctttgaggccttcgttggaaacgggatttctccatattctgctagacagaagaattctcagtaacttccttgtgttgtgtgtattcaactcacagagttgaacgatcctttaaacagagcagacttgaaacactctttttgtggaatttgcaagtggagatttcagccgctttgaggtcaatggtagaaaaggaaactaccttcatataaagactagacagaatgattctcagaaactcctttgtgatgtgtgcgttcaactcacagagtttaacctttcttttcatagagcagttaggaaacactctgcttgtaaagtctgcaagtggatattcagtcctctttgaggccttcgttggaaacgggtttttttcatataaggctagacagaagaattcccagtaacttcccttgtgttgtgtgtgttcaactcacagagttgaactttcatttacacagagcagatttgaaacactctttttgtggaatttgcaggtggagatttcaagcgctttgaggccaaaggcagaaaaggaaatatcttcgtataaaaactagacagaatcattctcagaaactgctctgcgatgtgtgcgttcaactctcaagagtttaacttttcttttcattcagcagtttggaaacactctgtttgtaaagtctgcacgtggatattttgaccacttagaggccttcgttggaaacgggtttttttcctgtaaggctagacagaagaattcccagtaacttccttgtgttgtgtacattcaactcacagagttgaacgttcccttagacagagcagatttgaaacactctttttgtgcaattggcaagtggtgatttcagccgctttgaggtcaatggtagaaaaggaaatatcttcgtataaaaactagacagaatgattctgagaaactcctttgtgatgtgtgcgttaaactcacagagtttaccctttcttttcatagagcagttaggaaacactctgtttgtaaagtctgcaagtggatattcagacatccttgaggctttcgttggaaacgggatttcttcatattctgccagaaagaagaattctcagtaacttccttgtgttgtgtgtattcaactcacacagttgaacgatcctttacacaaagcagacttgtaacactctttttgtggaatttgcaagtggggatttcagccgctttgaagtcaaatgtagaaaaggaaatatcttcctataaaaactagacagaatgattctcagaaacttctttgtgatgtgtgcgttcaactcacagagtttaacctttcttttcatagagcagttaggaaacactctgtttgtaaactctgcaagtggatattcagacctactttgaggccttcgttggaaacgggatttcttcatactgtgctagacagaagaattctcagtaacttccttgtgttgtgtgtattcaactcacagagttgaacgatcgtttacacagagcggacttgaaacactctttttgtggaatttgcaattggagatttcagccgcgttgaggtcaatggtagaaaaggaaatctcttcgtataaaaactagacagaaccattctcagaaactgctctgcgatgtgtgcgttcaactctcagagtttaacttttcttttcattcagcagtttggaaacactctgtttgtaaagtctgcacgtggatattttgaccacttagaggccttcgttggaaacgggtttttttcctgtaaggctagacagaagaattcccagtaacttccttgtgttgtctacattcaactcacagagttgaacgttcccttagacagagcagatttgaaacactctttttgtgcaattggtaagtggtgatttcagccgctttgaggtcaaaggtagaaaaggaaatatcttcgtataaaaactagacagaatcattcccaaaaactgcgttgtgatgtgctcgttcaactcacagagtttaacctttcttttcatagagcagttaggaaacagtctgtttgtaaattctgtaagtggatattctgacatcttgtggccttcgttggaaacgggatttcttcatattctgctagacagaagaattctcagtaacttccgcgtgttgtgtgtattcaactcacagagttgaacgatcctttacacagagcagacttgacacactctttttgtggaatttgcaagtggagatttcagccgctttgaggtcaatggtagaaaaggaaatatcttcgtataaaaactagacagaatgattctcagaaactcctttgtgatgtgtgcgttcaactcacagagtttaacctttcttttcatagagcagttaggaaacactctgtttgtaaagtctgcaagtggatattcagccctctttgaggccttcgttggaaacggttttttttcatataaggctagacagaagaattctcagtaacttccttgtgttgtgtgtattcaactcacagagttgaactttcatttagagagagcagatttgaaacactgtttttgtggaatttgcaagtggagatttcaagcgctttgcggccaaaggtagaaaacgaaatatcttcgtataaaaactagacagaatcattctcagaaactgctgcgtgatgtgtgcgctcaactctcagagtttaacttttcttttcattcagcggtttggaaacactctgtttgtaaagtctgcacgtggacattttgaccacttagaggccttcgttggaaacgggtttttttcatgtaaggctagacagaagaattctcagtaacttccttgtgttgtgtgtattcaactcacagagttcaacgatgctttacacagagtagacttgaaacacactttttgttgaatttgcaactggagatttcagccgctttgaggtcaatggtagaataggtaatatcttcctatagaaactagacagaatgattctcagaaactcctttgtgatgtgtgcgctcaactcacagagtttagcctttcttttcatggagcagttaggaaacactctgtttgtaaagtctgcaagtggatattcagacctctttgaggccttcgttggaaacgggatttcttcatattctgctagacagaagaattctcagaaacttccttgtgttgtgtgtattcaactcacagagttgaacgatcctttacacagagcagacttgaaacactctttttgtggaatttgcaagtggagatttcagccgctttgaggtcaatgttagaataggaaatatcttcctatagaaactagacagaatgattctcagaatctcctttgtgatgtgtgcgttcaactcacagagtttaacctttcttttcatagagcagttaggaaacactctgtttgtaaagtctgcaagtggatattcagacctctttgaggccttcgttggaaacgggtttttttcatataaggctagacagaagaattcccagtaacttccttgtgttgtgtgtgttcaactcacagagttgaactttgatttacacagagcagatttgaaacactctttttgtggaatttgcaggtggagatttcaagcgctttgaggccaaaggcagaaaaggaaatatcttcgtataaaaactagacagaatcattctcagaaactgctctgcgatgtgtgcgttcaactctcagagtttaacttttcttttcattcagaagtttggaaacactctgtttgtaaagtctgcacgtggataacttgaccacttagaggccttcgttggaaacgggtttttttcatgtacggctagacagaagaattcccagtaacttccttgtgttgtgtgcattcaactcacagagttgaacgttcccttagacagagcagatttgaaacactctatttgtgcaatttgcaagtgtagatttcaaccgctttaaggtcaatggcagaaaaggaaatatcttcgtttcaaaactagacagaatcattctcagaaactgctctgcgatgtgtgcgttcaactctcagagtttaacttttcttttcattcagcagtttggaaacactctgtttgtaaagtctgcacgtggataatttgtccacttagaggccttcgttggaaacgggtttttttcatgtaaggctagacagaagaattctcagtaacttccttgtgttgtgtgtattcaactcacagagttgaacgatcctttacacagagcagacttgtaacactctttttgtggaatttgcaagtggagatttcagctgctttgaagtcaaaggtagaaaaggaaatatcttcctataaaaactagacagaatgattgtcagaaactcctttgtgatgtgtgcgttcaactcacagagtttaacctttcttttcatagagcagttaggaaacactctgtttgtaaagtctgcaagtggatattcagacttctttgaagccttcgttggaagcgggatttcttcatattctgctagaaagaagaattcccagtaacttcccttgtgttgtgtgtgttcaactcacagagttgaactttcatttacacagagcagatttgaaacactctttttgtggaatttgcaagtggagatttcaagcgctttgaggccgaaggcagaaaaggaaatatcttcgtttcaaaactagacagaatcattctcagaaactgctctgcgatgtgtgtgttcaactctcagagtttaacttttcttttcattcagcagtttggaaacactctgtttgtaaagtctgcacgtggatattttgaccacttagaggccttcgttggaaacgggtttttttcctgtaaggctagacagtagaattcccagtaacttccttgtgttgtgtgcattcaactcacagagttgaacgttcccttagacagagcagatttgaaacactctatttgtgcaatttgcaagtgtagttttcaagctctttaaggtcaacggcagaaaaggaaatatcttggtttcaaaactagacagaatcattcccacaaactgcgttgtgatgtgttcgttcaactcacagagtttaacctttcttttcatagagcagttaggaaacagtctgtttgtaaattctgtaagtggatattctgacatccttgtggccttcgttggaaacgggatttcttcatattctgctagacagaagaattctcagtaacttccttgtgttgagtgtattcaactcacagagttgaacgatcctttacacagagcagacttgtaacactctttttgtggaatttgcaagtggagatttcagccgctttgaagtcaaaggtagaaaaggaaatatcttcctataaaaactagacagaatgattctcagaaactcctttgagatgtgtgtgttcaactcacagagtttaacctttcttttcatagagcagttaggaatcactctgtttgtaaagtctgcaggtggatattcagacctctttgaggccttcgttggaaacgggtttttttcatataaggctagagagaagaattcccagtaacttccttgtgttggctgtgttcaactcacagagttgaactttcatttacacagagcagatttgaaacactctttttgtggaatttgcaaatggagatttcaagcgctttgaggccaaaggcagaaaaggaaatatcttcgtataaaaactcgacagaatcattctcagaaactgctctgcgatgtgtgcgttcaactctcagagtttaacttttcttttcattcagcagtttggaaacactctgtttgtaaagtcttcacgtggataatttgaccacttagaggccttcgttggaaacgggtttttttcatgtaaggctagacagaagaattcccagtaacttccttgtgttgtgtacattcaactcacagagttgaacgttcccttagacagagcagatttgaaacactctttttgtgcaattggcaagtggagatttcaagcgctttaaggtcaatggcagaaaaggaaatatcttcgtttcaaaactagacagaatcattctcagaaactgctctgcgatgtgtgtgttcaactctcagagtttaacttttcttttcattcagcagtttggaaacactctgtttgtaaagtctgcacgtggataatttgaccacttagaggccttcattggaaacgggtttttttcatgtaaggctagacagaagaattctcagtaacttccttgtgttgtgtgtattcaactcacagagttgaccgatcctttacacagagcagacttgtaacactctttttgtggaatttgcaagtggagatttcagccgctttgaagtcaatggtagaaaaggaaatatcttcctataaaaactagacagaatgattctcagaaactcctttgtgatgtgtgcgttcaactcacagagtttaaccttccttttcatagagcagttaggaaacactctgcttgtaaagtctgcaagtggatattcagacctctttgaggccttccttggaaacgggattttttcatataaggctagacagaagaattcccagtaacttccttgtgttgtgtgtattcaactcacagagttgaactttcatttacacagagcagatttgaaacactctttttgtggtatttgcaagtggagatttcagccgctttgatgtcaatgatagaaaaggaaatatcttcgtataaaaactagacagaatcattctcagaaactgctgcgtgatgtgtgcgttcaactctcagagtttaacttttcttttcattcagcggtttggaaacactctgtttgtaaagtctgcacgtggatattttgaccacttagaggtcttcgttggaaacgggttttttttaatgtaaggctagacagaagaattcccagtaacttccttgtgttgtgtacattcaactcacagagttgaacgttcccttagacagagcagatttgaaacactctttttgtgcaattggcaaatggagatttcaagcgctttaaggtcaatggcagaaaaggaaatatcttcgtttcaaaactagacagaatcattcccacaaactgcgttgtgatgtgttcgttcaactcacagagtttaacctttctgttcatagagcagttaggaaacactctgtttgtaaagtctgcaagtggatattcagacctccttgaggctttcgttggaaacgggatttcttcatattctgctagacagagaagattctcagaaacttccttgtgttgtgtgttttcaactcacagagttgaacgatcctttacacagagcagacttgaaacactccttttgtggaatttgcaagtggagatttcagccgctttgaggtcaatggtagaataggaaatatcttcctatagaaactagacagatgattctcagaaactcctttgagatgtgtgcgttcaactcacagagtttaacctttcttttcatagagcagttaggaaacactctgtttgtaaagtctgcaagttgatattcagacctccttgaggccttcgttggaaacgggatttcttcatattatgctagacagaagaattcccagtaacttcccttgtgttgtgtgtgttcaactcacagagttgaactttcatttacacagagcagatttgaaacactctttttgtggaatttgcaaatggagatttcaagcgctttgcggccaaaggcagaaaaggaaatatcttcgtataaaaactagacagaatcattctcagaaactgctctgcgatgtgtgcgtttaactctcagagtttaacttttcttttcattcagcagtttggaaacactctgtttgtaaagtctgcacgtggataacttgaccacttagaggccttcgttggaaacgggtttttttcatgtaaggctagacagaagaattcccagtaacttccttgtgttgtgtgcattcaactcacagagttgaacgttcccttagacagagcagatttgaaacactctatttgtgcaatttgcaagtgtagttttcaagctctttaaggtcaacggcagaaaaggaaatatcttggtttcaaaactagacagaatcattctcagaaactgctctgcgatgtgtgctttcaactctcagagtttaacttttcttttcattcagcagtttggaaacactctgtttgtaaagtctgcacgtggataacttgaccacttagaggccttcgttggaaacgggtttttttcatgtaaggctagacagaagaattctcagtaacttccttgtattgtgtgtattcaactcacatagttgaacgatcctttacacagagcatacttgaaacactcttcttgtggaatttgcaagtggagatttcagccgctttgaggtcaatggtagaataggaaatatcttcctatagaaactagacagaatgattctcagaaactcctttgtgatgtgtgcgttcaactcacagagtttaacctttgttttcatagagcagttaggaaacactctgtttgtaaagtctgcaagtggatattcagacctgcttgaggccttctttggaaacgggatttcttcttattatgccagacagaagaattcccagtaacttccttgtgttgtgtgtgttcaactcacagagttgaactttcatttacacagagcagatttgaaacactctttttgtggaatttgcaaatggagatttcaagcgctttgaggccaaaggcagaaaacgaaatatcttcgtataaaaactagacagaatcattctcagaaactgctgcgtgatgtgtgcgttcaactctcagagtttaacttttcttttcattcagcggtttggaaacattctgtttgtaaagtctgcacgtggatattttgaccacttagaggccttcgttggaaacgggtttttttcatgtaaggctagacagaagaattcccaggaacttccttgtgttgtgtacattcaactcacagagttgaacgttcccttagacagagcagatttgaaacactctttttgtgcaattggcaaatggagatttcaagcgctttaagttcaatggcagaaaaggaaatatcttcgtttcaaaactagacagaatcattcccacaagctgcgttgtgatgtgttcgttcaactcacagagtttaacctttctgttcatagagcagttaggaaacactctgtttgtaaagtctgtaagtggatattctgacatcttgtggccttcgttggaaacgggatttcttcatattctgcaagacagaagaattctcagttacttccttgtgttgtgtgtattcaactcacagagttgaacgatcctttacacagagcagacttgaaacactctttttatggaatttgcaagtggagatttcagccgctttgaggtcaatggtagaaaaggaaatatcttcgtataaagactagacagaatgattctcagaaactcctttgtgatgtgtgcgttcaactcacagagtttcacttttcttttcatagagcagttaggaatcactctgtttgtaaagtctgcaagtggatattcagacctctttgaggccttcggtggaaacgggatttcttcatattatgctagacagaagaattctcagtaacttccttgtgttgtgtgtattcaactcacagagttgaaagatcctttacagagagcaggcttgaaacactctttttgtcgaatttgcaagtggagatttcagccgctttgaggtcaatggtagaataggaaatatcttcttatagaaactagacagaatcattctcagaaactgctgcgtgatgtgtgcgttcaactctctgagtttaacttttcttttcattcagcggtttggaaacactctgtttgtaaagtctgcacgtggatattttgaccacttagaggccttcgttggaaacgggtttttttcatgtaaggctagacagaagaattcccagtaacttccttgtgttgtgtgcattcaactcacagagttgaacgttcccttagacagagcagatttgaaacactctatttgtgcaatttgcaagtgtagatttcaagcgctttaaggtcaacggcagaaaaggaaatatgttcgtttcaaaactagacagaatgattctcagaaactcctttgtgatgtgtgcgttcaactcacagagtttcacctttcttttcatagagccgttaggaaacactctgtttgtaaagtctgcaagtggatattcagacctccttgaggccttcgttggaagcgggatttcttcatattatgctagacagaagaattctcagtaacttccttgtgttgtgtgtattcaactcacagagttgaacgatcctttacacagagcatacttgaaacactcttgttgtggaatttgcaagtggagatttcagccgctttgaggtcaatggtagaataggaagtatcttcctatagaaactagacagaatgattctcagaaactcctttgtgatgtgtgcgttcaactcacagagtttaacctttcttttcatagagcagttaggaaacactctgtttgtaatgtctgcaagtggatattcagacctctttgaggccttcgttggaaacgggatttcttcatattatgctagacagaagaattcccagtaacttccttgtgttgtgtgtgttcaactcacagagttgaactttcatttacccagagcagatttgaaacactctttttgtggaatttgcaagtggagatttcaagcgctttgaggccaaaggcagaaaaggaaatatcttcgtttcaaaactagacagcatcattctcagaaactgctctgcgatgtatgcgttcaactctcagagtttaacttttcttttcattcagcagtttggaaacactctgtttgtaaagtctgcacgtggatattttgaccacttagaggccttggttggaaacgggtttttttcatgtaaggctagacagaagaattcccagtaacttccttgtgttgtgtacattcaactcacagagttgaacgttcccttagacagagcagatttgaaacactctttttgtgcaattggcaagtggagatttcaagcgctttaaggtcaatggcagaaaaggaaatatcttcgtttcaaaactaggcagaatcattcccacaaactgcgttgtgatgtgttcgttcaactcacagagtttaacctttccgttcatagagcagttaggaaacacactgtttgtaaagtctgtaagtggatattctgacatcttgtggccttcgttggaaacgggatttcttcatattctgctagacagaagaattctcagtaacttccttgtgttgtgtgtattcaactcacagagttgcacgatcctttacacagagcagacttgaaacactctttttgtggaatttgcaagtggagatttcagccgctttgagttcaatggtagaataggaaatatcttcctatagaaactagacagaatgattctcagaatctcctttgtgatgtgtgcgttcaactcacagagttcaacctttcttttaatagagtagttgggaaacactctgtttgtaaagtctgcaagtggatattcagacttctttgaggccttcgttggaagcgggatttcttcatattctgctagacagaagaattctcagtaacctccttgtgttgtgtgtattcaactcacagagttgaacgaccctttacacagagcagacttgaaacactctttttgtggaatttgcaagtggagatttcagccgctttgaggtcaatggtagaataggaaatatcttcctatagaaactagacagaatcattctcagaaactgctgcgtgatgtgtgcgttcaactctcagagtttaacttttcttttcattcagcggtttggaaaccctctgtttgtaaagtctgcacgtggatattttgaccacttagaggccttcgttggaaacgggttttttgtatgtaaggctagacagaagaattcccagtaacttccttgtgttgtgtgcattcaactcacagagttgaacgttcccttagacagagcagatttgaaacactctatttgtgcaatttgcaagtgtagatttcaagcgctttaaggtcaacggcagaaaaggaaatatcttcgtttcaaaactagacagaatgattctcagtaaactcctttgtgacgtgtgcgttcaactcacagagtttaacctttctgttcatagagcagttaggaaacactctgtttgtaaagtctgcaagtggatattcagacctccttgaggccttcgttggaaacgggatttcttcatattctgatagacagaagaattctcagtaacttcccttgtgttgtgtgtattcaactcacagagttgaacgatcctttacacagagcagacttgaaacactctttttgtggaatttgcaagtggagatttcagccgctttgaggtcaatgttagaataggaaatatcttcctatagaaactagacagaaatgattctcagaaactcctttgtgatgtgtgcgttcaactcacagagtttaacctttcttttcatagagcagttaggaaacactctgtttgtaaagtctgcaagtggatattcagacctgtttgaggccttcgttggaaacgggtttttttcatataaggctagacagaagaattctcaggaacttccttgtgttgtgtgtattcaactgacagagttgaactttcatttagagagagcagatttgaaacactgtttttgtggaatttgcaagtggagattccaagcgctttggggccaaaggcagaaaaggaaatatcttcgtagaaaaactagacagaatcattctcagaaactgctctgcgatatgtgcgttcaactctcagagtttaacttttcttttcattcagcagtttggaaacactctgtttgtaaagtctgcacgtggatattttgaccacttagaggccttcgttggaaacgggtttctttcctgtaaggctagacagaagaattcccagtaacttccttgtgttgtgtacattcaacacacagatttgaacgttcccttagacagagctgatttgaaacactctttttgtgcaattggcaagtggagatttcaagcgctttaaggtcaatggcagaaaagtaaatatcttcgtttcaaaactagacagaatcattcccacaaactgcgttgtgatgtgttcgttcaactcacagagtttaacctttcttttcatagagcagttagcaaacagtctgtttgtcaattctgtaagtggatattctgacatcttgtggccttcgttggaaacgggatttcttcatattctgctagacagaagaattctcagtaacttccttgtgttgtgtgtattcaactcacagagttgaatgatcctttacacagagcagacttgaaacactctttttgtggaatttgcaagtggagatttcagccgctttgaggtcaatagtagaaaaggaaatatcttcgtagaaaaactagacagaatgattctcagaaaatcctttgtgatgtgtgcgttcaactcacagagtttaacttttcttttcatagagcagtttggaaacactctgtttgtaaagtctgcaagtggatattcagacctctttcaggccttcgtcggaaacgggatttcttcatattatgctagacagaagaattcccagtaacttccttgtgttgtgtgtgttcaactcacagagttgaactttcatttacacagagcagatttgaaacactctttttgtggaatttgcaaatggagatttcaagcgctttgaggccaaaagcagaaaaggaaatatcttcgtataaaaactagacagaatcattctcagaaactgctgcgtgatgtgtgcgttcaactctcagagtttaactattcttttcattcagcggtttggaaacactctgtttgtaaagtctgcacgtggaaattttgaccacttagaggccttcgttggaaacgggtttttttcatgtaaggctagacagaagaattcccagtaacttccttgtgttgtgtacattcaactcacagagttgaacgttcccttagacagagcagatttgaaatactctttttgtgcaattggcaagtggagatttcaagcgctttaaggtcaatggcataaaaggaaatatcttggtttcaaaactagacagaatcattcccacaaaccgcgttgtgatgtgttcgttcaactcacagagtttaacctttctgttcatagagcagttaggaaacactctgtttgtaaagtctgtaagtggatattctgacaacttgtggccttcgttggaaacgggatttcttcatattctgctagacagaagaattctcagtaacttcccttgtgttgtgtgtattcaactcacagagttgaatgatcctttacacagaacagtcttgaaacactctttttgtggaatttgcaagtggagatttcagccgctttgaggtcaatggtagaataggatatatcttcctatagaaactagacagaatgattctcagaaactactttgtgatgtgtgcgttcaactcacagagtttaacctttcttttcatagagcagttaggaaacactctgtttgtaaagtctgcaagtggatattcagacctctttgaggccttcgttggaaacgggatttcttcatactgtgctagacagaagaattctcagtaacttcccttgtgttgtgtgtattcaactcacagagttgaacgatcctttacacagagcggacttgaaacacactttttgtggaatttgcaagtggagatttcaagcgctttgaggccaaaggcagaaaaggaaatatcttcgtataaaaactagacagaatgattctcagaaactcctttgtaatgtgtgcgttcaactcacagagtttaacctttcttttcatagagcagttaggaaacactctgtttgtaaagtctgcaagtggatattcagacctctttgaggccttcgttggaaacgggttattttcatataaggctagacagaagaattccctttaaattgcttgtgttgtgtgtattcaactgacagatttgaactttcatttagacagagcagatttgaaacactctttttgtgcaatttgcaagtggaaatttcaaacgctttaaggtcaatggcagaaaaggaaatatcttcgtttcaaaactagacagaatcattcccacaaactgcgttgtgctgtgttcgttcaactcacagagtttaacctttcttttcatagagcagttaggaaacactctgtttgtaaactctgcaagtggatattcacacctcttagaggccttcgttggaaacggtatttcttcatattatgctagatagaagaaatctcagtaacttccttgtgttgtgtttattcaactcacagagttgaacgatcctttacacagagcagacttgaaacactctttttgtggaatttgcaagtggagatttcagccgctttgaggtcaatggtagaaaagtaaatatcttcgtataaagactagacagaatgattctcagaaacttcttggtgatgtgtgcgttcaactcacagagtttaacctttcttttcatagagcagttaggaaacactctgtttgtaaactctgcaagtggatattcacacctctttgaggccttcgttggaaacgggatttcttcatactgtgctacacagaagaattctcagtaacttccttgtgtagtgtgtattcaactgacagagttgaactttcatttagagagagcagatttgaaacactgtttttgtggaatttgcaagtggagatttcaagcgctttggggccaaaggcagaaaaggaaatatcttcgtataaaaactagacagaaacattctcagaaactgatgcgtgatgtgtgcgttcaactctcagagtttaacttttcttttcattcagcggtttggaaacactctgtttgtaaagtctgcacgtggaaattttgaccacttagaggccttcgttggaaacgggtttttttcatgtaaggctagacagaagaattcccagtaacttccttgtgttgtgtgcattcaactcacagagttgaacgttcccttagacagagcagatttgaaacactctatttgtgcaatttgcaagtgtagttttcaagctctttaaggtcaacggcagaaaaggaaatatcttcgtttcaaaactagacagaatcattcccacaaactgcgttgtgatgtgtacgttcaactcacagagtttaacctttccgttcatagagcagttaggaaacactctgtttgtaaagtctgtaagtggatattctgacatcttgtggccttcgttggaaacgggatttcttcatattctgcgagacagaagaattctcagtaacttccttgtgttgtgtgtattcaactcacagaagttgaacgatcctttacacagagcagacttgtaacactctttttgtggaatttgcaagtggagatttcagccgctttgaagtcaaaggtagaaaaggaaatatcttcctataaaaactagacagaacgattctcagaaactcctttgtgatgtgtgcgttcaactcacagagtttaacctttcttttcatagagcagttaggaaacactctgtttgtaaagtctgcaagtggatattcagacctctttgaggccttcgttggaaacggggatttcttcatattctgctagacagaagaattctcagtaacttccttgtgttgtgtgtattcaactgacagagttgaactttcatttagagagagcagatttgaaacactgtttttgtggaatttgcaagtggagattacaagcgctttggggccaaaggcagaaaaggaaatatcttcgtataaaaactagacagaatcattctcagaaactgctgcgtgatgtgtgcgttcaactctcagagtttaacttttcttttcattcagcggtttggaaaaactctgtttgtaaagactgcacgtggatattttgaccacttagaggccttcgttggaaacgggttttttttcatgtaaggctagacagaagaattcccagtaacttccttgtgttgtgtacattcaactcacggagttgaacgttcccttagacagagcagatttgaaacactctttttgtgcaattggcaaatggagatttcaagcgctttaagttcaaaggcagaaaaggaaatatcttcgtttcaaaactagacagaatcattcccacaaactgcgttgtgatgtgttcgttcaactcacagagtttaacctttctgttcatagagcagttaggaaacactctgtttgtaaagtctgtaagtggatattctcacatcttgtggccttcgttggaaacgggatttcttcatattctgctagacagaagaattctcagtaacttccttgtgttgtgtgtattcaactcacagagttgaacgatcctttacacagagcagacttgtaacactctttttgtggaatttgcaagtggagatttcagccgctttgaagtcaaagtagaaaaggaaatttcttcctataaaaactagacagaatgattctcagaaactcctttgacatgtgtgcgttcaactcacagagtttaacctttcttttcatagagcagttaggaatcactctgtttgtaaagtctgcaagtggatattcagacctctttgaggccttcgttggaaacgggtttttttcatataaggctagacagaagaattcccagtaacttccttgtgttgtgtgtgttcaactcacagagttgaactttcatttacacagagcagatttgaaacactctttttgtggaatttgcaagtggagatttcaattgctttgaggccaaaggcagaaaaggaaatatcttcgtataaaaactagacagaatcattctcagaaactgctctgtgatgtgtgcgttcaactctcagagtttaactttgcttttcattcagcagtttggaaacactctgtttgtaaagtctgcacgtggataatttgaccacttagaggccttcgttggaaacgggtttttttcatgtaaggctagacagaagaattcccagtaacttccttgtgttgtgtgcattcaactcacagagttgaacgttcccttagacagagcagatttgaaacactctatttgtgcaatttccaagtgtagatttcaagcgctttaaggtcaacggcagaaaaggaaatatcttcgtttcaaaactagagagaatcattcccacaaactgcgttgtgatgtgttcgttcaactcacagagtttaacctttctgttcatagagcagttaggaaacactctgtttgtacagtctgccagtggatattcagacctccttgaggccttcgttggaaacgggatttcttcatattctgctagacagaagaattctcagtaacttccttgtgttgtgtgtattcaactcacagagttgcacgatcctttacacagagcagacttgtaacactctttttgtggaatttgcaagtggagatttcagccgctttgaagtcaaaggtagaaaaggaaatatcttcctataaaaactagacagaatgattctcagaaactcctttgtgatgtgtgcgttcaactcacagagtttaacctttcttttcatagagcagttaggaaacactctgtttgtacagtctgcaagtggatattcagacatccttgaggctttcgttggaaacgggatttcttcatattctgctagacagaagaattctcagtaacttccttgtgttgtgtgtattcaactgtcagagttgaactttcatttagagagagcacatttgaaacactgtttctgtggaatttgcaagtggagatttcaaacgctttggggccaaaggcagaaaaggaaatatcttcgtataaaaactagacagaatcatactcagaaactgctgcgtgatgtgtgcgttcaactctcagagtttaacttttcttttcattcaacggtttggaaacactctgtttgtaaagtctgcacgtggatattttgaccacttagaggccttcgttagaaacgggttttttcatgtaaggctagacagaagaattctcagaaacttcgttgtgttgtgtgttttcaactcacagagttcaacgatcctttacacagagtagacttgaaacactctttttgtggaattggcagggtggagatttcagccgctttgaggtcagtggtagaaaaggaaatatcttcgtataaaaactagacagagtgattctcagaaactcctttgtgatgtctgcgttcaactcacagagtttaacctttcttttcatagagcagttaggaaacactgtgtttgtaaagtctgcaagtggatattcagacctccttgaggccttcgttggaaacgggatttcttcatattctgctatacagaagaattctcagaaacttccttgtgttgtgtgtattcaactcacagagttgaacgatcctttacacagagcagacttgaaacactctttttgtggaatttgcaagtggagatttcagccgctttgaggtcaatggtagaataggaaatatcttcctatagaaactagacagaatgattctcagaaactcctttgtgatgtgtgcgttcaactcacagagttcaacctttcttttcatagagcagttgggaaaaactctctttgtaaagtctgcaagtggatattcagacttctttgaggccttcgttggaagcggggtttcttcatattctcctagacagaagaattcccagtaacttccttgtgttgtgtgtgttcaactcacagagttgaactttcatttacacagagcagatttgaaacactctttttgtggaatttgcaagtggagatttcaagcgctttgaggccaaaggcagaaaaggaaatatcttcgtttgaaaactagacagaatcattctcagaaaatgctctgtgatgtgtgcgttcaactctcagagtttaacttttgttttcattcagcagtttggaaacactctgtttgtaaagtctgcacgtggatattttgaccacttagaggccttcgttggaaacgggtttttttcatgtaagggtagacagaagaattcccagtaacttccttgtgttgtgtacattcaactcacagagttgaacgttcccttagacagagcagatttgaaacactctttttgtgcaattggcaaatggagatttcaagcgctttaaggtcaatggcagaaaaggaaatatcttcgtttcaaaactagacagaatcattcccacaaactgcgttgtgatgtgttcgttcaactcacagagtttaacctttcttttcatagagcagttaggaaacagtctgtttgtaaattctgtaagtggatattctgacatccttgtggccttcgttggaaacgggatttcttcatattctgctagacagaagaattctcagtaacttccttgggttgtgtttattcaactcacagagttgaatgatcctttacacagagcagacttgaaacactctttttgtggaatttgcaagtggagatttcagccgctttgaggtcaatggtagaaaagtaaatatcttcgtataaagactagacagaatgattgtcagaaactcctttgtgatgtgtgcgttcaactcacagagtttaacctttcttttcatagagcagttaggaaacactctgtttgtaaagtctgcaagtggatattcagacctccttgaggccttcgttggaaacgggatttcttcatattctgctagacagaagaattctcagtaacttccttgtgttgtgtgtattcaactgacagagttgaactatcatttagagagagcagatttgaaacactgtttttgtggaatttgtaagtggagatttcaagcgctttggggccaaaggcagaaaaggaaatatcttcgtataaaaactagacagaatcattctcagaaactgctgcgtgatgtgtgcgttcaagtctcagagtttaacttttcttttcattcagcggtttggaaacactctgtttgtaaagtctgcacgtggaaattttgaccacttagaggccttcgttggaaacgggtttttttcatgtaaggctagacagaagaattcccagtaacttccttgtgttgtgtgcattcaactcacagagtggaacgttcccttagacagggcagatttgaaacactctatttgtgcaatttgcaagtgtagatttcaagcgctttaaggtcaacggcagaaaaggaaatatcttcttttcaaaactagacagaatcattcccacaaactgcgttgtgatgtgttcgttcatctcacagagtttaacctttcttttcgtagagcagttaggaaacagtctgtttgtaaattctgtaagtggatattctgacatcttgtggccttcgttggaaacgggatttcttcatactgtgctagacagaagaattctcagtaacttccttgtgttctgtgtattcaactcacagagttgaacgatcctttacacagagcagacttgaaacactctttttgtggaatttgcaagtggagatttcagccgctttgaggtcaatggtagaataggaaatatctttctatagaaactagacagagtgattctcagaaactcctttgtgatgtctgcgttcaactcacagagtttaacctttcttttcatagagcagttaggaaacactctgtttgtaaagtctgcaagtggatattcagacctccttgaggccttcgttggaaatgggatttcttcatattctgctatacagaagaattctcagtaacttccttgtgttgtgtgtattcaactcacagagttgaacgatcctttacacagagcatacttggaacactcttcttgtggaatttgcaagtggagatttcagccgctttgagatcaatggtagaataggaaatatcttcgtataaaaactagacagaatcattctcagaaactgctctgtgatgtgtgcgttcaactctcaaagtttaacttttcttttcattcagcagtttggaaacactctgtttgtaaagtctgcacgtggatattttgaccacttagaggccttcgttggaaacgggttttttttcatgtaaggctagacggtagaattcccagtaacttccttgtgttgtgtgcattcaactcacagagttgaacgttcccttagacagagcagatttgaaacactctatttgtgcaatttgcaagtgtagatatcaagcgctttaaggtcaatggcagaaaaggaaatgtcttagtttcaaaactagacagaatgattctgagaaaatcctttgtgatttgtgcgttcaactcacagagtttaacctttcttttcatagagcagttaggaaacactctgtttgtaaagtctgcaagtggatattcagacctccttgaggccttcgttggaaacgggatttcttcatattatgctagacagaagaattctcagtaacttccttgtgttgtgtgtattcaactcacagagttgaacgatcctttacacagagcagacttgaaacactctttttgtggaatttgcaagtggagatttcagccgctttgaggtcaatggtagaataggaaatatcttcctatagaaagtagacagaatgattctcagaaattactttgtgatgtgtgcgttcaactcacagagtttaacctttcttttcatagagcagttaggaaacactctgtttgtaaagtctgcaagtggatattcagacatctttgaggctttcgttggaaacgggatttcttcttattctgctatacagaagaattctcagtaacttccttttgttgtgtgtattcaactgacagagttgaactttcatttagacagagcagatttgaaacattctttttgtggaatttgcaagtggagatttcaagcgctttgaggccaaaggcagaaaaggatatatcttcgtataaaaactagacagaatcattctcagaaactgctgcgtgatgtgtgcgttcaactctcagagttgaacttttcttttcattcagcggtttggaaacactctgtttgtaaagtctgcacgtggaaattttgaccacttagaggccttcgttggaaacgggtttttttcatgtaaggctagacagaagaattcccagtaacttccttgtgttgtgtacattcaactcacagagttgaacgttcccttagacagagcagatttgaaacactctttttgtgcaattggcaaatggagatttcaagcgctttaaggtcaatggcagaaaaggaaatatcttcgtttccaaactagacagaatcattcccacaaactgcgttgtgatgtgttcgttcatctcacagagtttaacctttcttttcgtagagcagttaggaaacagtctgtttgtaaattctgtaagtggatattctgacatcttgtggccttcgttggaaacgggatttcttcatattctgctagacagaagaattctcagtaacttccttgtgttgtgtgtattcaactcacagagttgaacgatcctttacacagagcagacttgaaacactctttttgtggaatttgcaagtggagatttcagccactttgaggtcaatgttagaataggaaatatcttcctatagaaactagacagaatgattctcagaaactcctttgtgatgtgtgtgttcaactcacagagtttaacctttcttttcatagagcagttagtaaacactctgtttataaagtctgcaagtgaatattcagacccctttgagggcttcgttggaaacgggatttcttcatattatgctagacagaagaattcccagtaacttccttgtgttgtgtgtgttcaactcacagagttgaactttcatttacacagagcagatttgaagcactctttttgtggaatttgcaagtggagatttcaagcgctttgaggccaaaggcagaaaaggaaatatcttcgtttcaaaactagacagaatcattctcagaaactgctctgcgatgtgtgcgttcaactctcagaagtttaacttttcttttcattcagcagtttgaaaacactctgtttgtaaagtctgcacgtggataatttgactacttagaggccttcgttggacacgggtttttttcatgtaaggctagacagaagaattcccagtaacttccttgtgttgcgtacattcagctcacagagttgaacgttcccttagacagagcagatttgaaacactctttttgtgcaattggcaagtggagatttcaagcgctttaaggtcaatggcagaaaaggaaatatcttcgtttcaaaactagacagaatcattcccacaaactgcgttgtgatgtgttcgttcaactcacagagtttaacctttcttttcatagagcagttaggaaacagtctgtttgtaaattctgtaagtggatattctgacatcttgtggccttcgttggaaacaggatttcttcatattctgctagacagaagaattctcagtaacttccttgtgttgtgtgtattcaactcagagagttgaacgatcctttacacagagcagacttgaaacactctttttgtggaatttgcaagtggagatttcagccgctttgaggtcaatggtagaataggaaatatcttcctatagaaactagacagaatgattctcagaaactcctttgtgatgtgtgcgttcaactcacagactttaacctttcttttcatagagcagttaggaaacactctgtttgtaaagtctgcaagtggatattcagacatctttgaggctttcgttggaaacgggttttcttcatattctgctatacagaagaattctcagaaacttccttgtgttgtgtgtcttcaactcacagagttgaacgatgctttacacagagcagacttgaaacactctatttgtggaatttgcaagtggagatttcagccgctttgaggtcaatggtagaataggaaatatcttcttatagaaactagacagaatcattctcagaaactgctctgtgatgtgtgcgttcaactctcagagtttaacttttcttttcattcagtagtttggaaacactctgtttgtaaatctgcacgtggatattttgaccacttagaggctttcgttggaaacgggtttttttcatgtaaggctagacagaagaattcccagtaacttccttgtgttgtgtgcattcaactcacagagttgaacgttcccttagacagagcagatttgaaacactctatttgtgcaatttgcaagtgtagatttcaagcgctttaaggtcaacggcagaaaaggaaatatcttcgtttcaaaactagatagaatcattcccacaaactgcgttgcgatgtgttcgttcaactcacagagtttaacatttcttttcatagagcacttaggaaacagtctgtttgtaaattctgtaagtggatattctgacatcttgtggccttcgttggaaacaggatttcttcatattctgctagacagaagaattctcagtaacttctttgtgttgtgtgtattcaactcacagagttgaacgatcctttacacagagcagacttgaaatactcgttttgtggaatttgcaagtggagatttcagccactttgaggtcaatggtagaaaaggaaatatcttcgtataaatactagacagaatgattctcagaaactcctttgtgatgtgtgcgttcaactcacagagtttaacttttcttttcatagagcagttaggaaacactctgtttgtaaagtctgcaagtggatattcagagctcctttgaggccttcgttggaaacgggatttcttcatattctgctagacagaataattctcagtaacttccttgtgttgtgtgtattcaagtcacagagttgaacgatcctttacagagagcagacttgaaacactctttttgtggaatttgcaattggagatttcaaccgctttgaggtcaatagtagaaaaggaaatatcttcgtagaaaaactagaaagaatcattctcagaaactgctctgcgatgtgtgcgttcaactctcagagtttaacttttcttttcattcaacagtttggaaacactctgtttgtaaagtctgcacgtggataatttgaccacttagaggccttcgttggaaacgggtttttttcctgtaaggctagacagaagaattcccagtaacttccttgtgttgtgtacattcaactcacagagttgaacgttcccttagacagagcagatttgaaacactctttttgtgcaattggcaagtggtgatttcagccgctttgaggtcaatggtagaaaaggaaatatcttcgtataaaaactagacagaatgattctcagaaacttctttgtgacgtgtgcgttcaactcacagagtttaacctttcttttcatagagcagttaggaaacactctgtttgtaaagtctgcaagtggatattcagacctcctcgaggctttcgttggaaacgggatttcttcatattgtgctagacagaagaattctcagtaacttccttgtgttgtgtgtattcaactcacagagttgaacgatcctttacacagagccgacttgaaacactctttttgtggaatttgcaagtggagatttcagccgctttgaggtcaatggtggaaaaggaaatatcttcgtataaaaactagacagaatgattctcagaaactcctttgtgatgtgtgcgttcaactcacagaggttaacctttcttttcatagagcagttaggaaacactctgtttgtaaagtctgcaagtggatattcagacctctttgaggccttcgttggaaaagggtttttttcatataaggctagacagaagaattcccagtaacttccttgtgttgtgtgtgttcaactcacagagttgaactttcatttacacagagcagatttgaaacactctttttgtggaatttgcaagtggagatttcaagcgctttgaggccaaatgcagaaaaggaaatatcttcatataaaaactagacagaatcattctcagaaactgctctgcgaatgtgtgcgttcaactctcagagtttaacttttcttttcattcagcagtttggaaacactctgtttgtaaagtctgcacgtggataatttgaccacttagaggccttcgttggaaacgggtttttttcatgtaaggctagacagaagaattcccagtaactttccttgtgttgtgtacattcaactcacagagttgaacgttcccttagacagagcagatttgaaacactctttttgtgcaattggcaagtggtgatttcagccgctttgaggtcaatggtagaaaaggaaatatcttcgtataaaaactagacagaatcattcccacaaactgcgttgtgatgtgttcgtccaactcacagagtttaacctttctgttcatagagcagttaggaaacactctgtttgtaaagtctgtaagtggatattctgatatcttgtggccttcgttggaaacgggatttcttcatattctgctagacagaataattctcagtaacttccttgtgttgtgtgtattctactcacagagttgaacgatcctttacacagagcagacttgaaacactctttttgtggaatttgcaagtggagatttcagccgctttgaggtcaatggtagaataggaaatatcttcctatagaaactagaccgaatgattctcagaaactcctttgtgatgtgtgcgttcaactcacagagtttaacctttcttttcattgagcagttaggaaacactctgtttgtaaagtctgcaagtggatattcagacctccttgaggacttcgttggaaacgggatttcttcatattatgctagacagaagaattcccagtaacttccttgtgttgtgtgtgttcaactcacagagttgaactttcatttacacagagcagatttgaaacactctttttgtgtaatttgcaagtggagatttcaagcgctttgaggccaaaggcagaaaaggaaatatcttcgtttcaaaactagacagaatcattctcagaaactgctctgtgatgtgtgcgttcaactctcagagtttaacttttcttttcattcagcagtttggaaacactctctttgtaaagtctgcacgtggatattttgaccacttggaggccttcgttggaaacgggtttttttcatgtaaggctagacaggagaattctcagtaacttccttgtgttgtgtacattcaactcacagagttgaacgttcccttagacagagcagatttgaaacactctttttgtgcaattggcaagtggtgatttcagccgctttgaggtcaatggtagaaaaggaaatatcttcgtataaaaactagacagaatgattctcagaaactcctttgtgatgtgtgcgttcaactcacagagtttaacatttcttttcatagagcagttaggaaaaactctgtttgtaaggtctgcaagtggatattcagacatctttgaggctttcgttggaaacgggttttcttcatattatgctagacagaagaattctcagaaacttccttgtgttgtgtgttttcaactcacagagttgaacgatgctttacacagagtagacttgaaacactctttttgtggaatttgcaagtggagatttcagccgctttgaggtcaatggtagaataggaaatatcttcctatagaaactagacagaacgattctcagaaactcctttgtgatgtgtgcgttcaactcacagagtttaacctttcttttcatagagcaattaggaaacactctgtttgtaaagtctgcaagtggatattcagacctctttgaggccttcgttggaaacgggatttcttcatattctgctagacagaagaattcccagtaactttcttgtgttgtgtgtgttcaactcacagagttgaactttcatttacacagagcagatttgaaacactctttttgtggaatttgcaaatggagatttcaagcgctttgaggccaaaggcagaaaaggaaatatcttcgtataaaaactagacagaatgattctcagaaactcctttgtgatgtgtgcgttcaactcaccgagtttaacctttcttttcatagagcagttaggaaacactctgtttgtaaagtctgcaagtggatattcagacctctttgaggccttcgttggaaacggctatttttcatataaggctagacagaagaattcccagtaacttccttgtgttgtgtacattcaactcacagagttgaacgttcccttagacagagcagatttgaaacactctttttgtgcaattggcaagtggagatttcaagcgctttgaggtcaatggcagaaaaggaaatatcttcgtttcaaaactagacagaatcattcccacaaactgcgttgtgatgtgttcgttcaactcacagagtttaacctttctgttcatagagcagttaggaaacactctgtttgtaaagtctgtaagtggatactctgacatcttgtggccttcgtaggaaacgggatttcttcatattctgctagacagaagaattgtcagtaacttccttgtgttgtgtgtattcaactcacagagttgaacgatcctttacagagagcagacttgaaacactctttttgtggaatttgcaagtggagatttcagccgctttgaggtcaatagtagaaaaggaaatatcttcacagaaaaactagacagaatgattctcagaaacttctttgttatgtgagcattcaactcacagagttgaacctatcttttgattgagcagttttgaatctctcattttgcagaatctgcaaggggatatttggagccctttgcggcctatggtggaaaaggaaataccttcaaatgaaaagcacacagaagaattctcagtaacttccttgtgttctgtgtattcaactgacagagttgtactttcgtttagagagagcagatttgaaacactgtttttgtggaatttgcaagtggagatttcaagcgctttggggccaaaggcagaaaaggaaatatcttcgtataaaaactagacagaatcattctcagaaactgctctgcgatgtgtgcgttcaactctcagagtttaatttttcttttcattcagcagtttggaaacactctgtttgtaaagtctgcacgtggataacttgaccacttagaggccttcgttggaaacgggtttttttcacgtaaggctagacagaagaattcccagtaacttcattgtgttgtgtgcattcaactcacagagttgaacgttcccttagacagagcagatttgaaacactctatttatgcaatttgcaagtgtagatttcaagcgctttaaggtcaatggcagaaaaggaaatatcttcgtttcaaaactagacagaatgattctcagaaactcctttgtgatgtgtgcgttcaactcacagagtttaacctttcttttcatagagcagttaggaaacactctgtttgtaaattctgtaagtggatattctgacatcttgtggccttcgttggaaacgggatttcttcatattctgctagacagaagaattctcagtaacttccttgtgttgtgtgtattcaactcacagagttgaatgatcctttacacagaacagacttgaaacactcttgttgtggaatttgcaagtggagaattcagccgctttgaggtcaacggtagaataggaaatatcttcctatagaaactagacagaatgattatcagaaactcctttgtgatgtgtgcgttcaactcacagagtttaacctttcttttcatagagcagttaggaaacactctgtttgtaaagtctgcaagtggatattcagacatccttgaggctttcgttggaaacgggatttcttcatattctgctagaaagaagaattctcagtaacttccttgtgttgtgtgtattcaactcacagagttgaacgatcctttacacagagcagacttgaaacactctttttgtgtaatttgcaagtggagatttcagccgctttgaggtcaatggtagaaaaggaaatatcttcgtataaaaactagacagaatgattctcagaaactcctttgtgatgtgtgcgttcaactcacagaatttaacctttcttttcatagagcagttaggaaacactctgtttgtaaagtctgcaagtggatattcagacctccttgaggccttcgttggaaacgggatttcttcatattatgctagacagaagaattcccagtaacttccttgtgttgtgtgcattcaactcacagagttgaacgttcccttagacagagcagatttgaaacactctatttgtgcaatttccaagtgtagatttcaagcgctttaaggtcaacggcagaaaaggaaatatcttcgtttcaaaactagacagaatcattcccacaaacagcgttgtgatgtgttcgttcaactcacagagtttaaccctttctgttcatagagcagttaggaaacactctgtttgtaaagtctgtaagtggatattctgacatcttgtggccttcgttggaaacgggatttcttcatattctgctagacagaagaattctcagtaacttccttgtgttgtgtgtattcaactcacagagttgaacgatcctttacacagagcagacttgaaacactctttttgtggaatttgcaagtggagatttcagccgctttgaggtcaacggtagaaaaggaaatatcttcgtataaaaactagacagaatgattctcagaaactcctttgtgatgtgtgtgttcaactcacagattttaacctttcttttcatagagcagttaggaaacactctgtttgtaaagtctgcaagtggatattcagacctctttgaggtcttcgttggaaacgggtttttttcatataaggctagacagaagaattcccagtaacttccttgtgttgtgtgtgttcaactcacagagttgaactttcatttacacagagcagatttgaaacactctttttgtggaatttgcaagtggagatttcaagcgttttgaggccaaaggcagaaaaggaaatatcttcgtttcaaaactagacagaatcattctcagaaactgctctgcgatgtgtgcgttcaactctcagagtttaacttttcttttcatttagcagtttggaaacactctgtttgtaaagtctgcacgtggatattttgaccacttagaggccttcgttggaaacgggtttttttcctgtaaggctagacagaagaattcccagtaacttccttgtgttgtgtacattcatctcacagagttgaacgttcccttagacagagcagatttgaaacactctttttgtgcaattggcaagtggagatttcaagcgctttaaggtcaatggcagaaaaggaaatatcttcgtttcaaaactagacagaatcattcccacaaactgcgttgtgatgtgttcgttcaactcacagagtttaacctttgttttaatagaggagttaggaaacagtctgtttgtaaattctgtaagtggatattctgacatcttgtggccttcgttggaaacgggatttcttcatattctgctagacagaagaattctcagaaactttccttgtgttgtgtgttttcaactcacagagttgaacgatgctttacacagagtagacttgaaacactctttttgtgtaatttgcaagtggagatttcagccgctttgaggtcaatggtagaaaaggaaatatcttcgtataaaaactagacagaatgattctaagaaactcctttgtgatgtgtgcgttcaactcacagagtttaacctttcttttcatagagcagttaggaaacactctgtttgtaaagtctgcaagtggatattcagacatctttgaggctttcgttggaaacgggatttcttcatattctgctagacagaagaattctcagaaacttcgttgcgttgtgtgttttcaactcacagagttcaacgatcctttacacagagtagacttgaaacactctttttgtggaattggcagggtggagatttcagccgctttgaggtcaatggtagaaaaggaaatatcttcgtataaaaactagacagaatcattctcagaaactgctgcgtgatgtgtgcgttcaactctcagagtttaacttttcttttcattcagcggtttggaaacactctgtttgtaaagtctgcatgtggaaattttgaccacttagaggccttcgttggaaacgggtttttttcatgtaaggctagacagaagaattctcagtaacttccttgtgttgtgtgtattcaactcacagagttgaacgatcctttacacagagcagacttgaaacactctttttgtggaatttacaagtggagatttcagccgctttgaggtcaatggtagaaaaggaaatatcttcgtataaagactagacagaatgattctcagaaactcctttgtgatgtgtgcgttcaactcacagagtttaacttttcttttcatagagcagttaggaaacactctgtttgtaaagtctgcaagtggatattcagacctctttgacgccttcgttggaaacgggatttcttcatattatgctagacagaagaattctcagtaacttccttgtgttgtgtgtattcaactcacaggagttgaacgatcctttacacagagcagacttgaaacactctttttgtggaatttgcaagtggagatttcagccgctttgaggtcaatggtagaaaaggaaactatcttcatataaagactagacagaatgattctcataaactcctttgtgatgtgtgcgttcaactcacagagtttaacctttcttttcatagagcagttaggaaacactctgtttgtaaagtctgcaagtggatattcagacccctttgaggccttcgttggaaacgggatttcttcatattatgctagacagaagaattcccagtaacttccttgtgttgtgtgtgttcaactcacagagttgaactttcatttacacagagcagatttgaaacactcattttgtggaatttgcaagtggagatttcaagcgcttgtgaggccaaaggcagaaaaggaaatatcttcagtataaaaactagacagaatcattctcagaaactgctctgcgatgtgtgcgttcaactctcagagtttaacttttcttttcattcaacagtttggaaacactctgtttttaaagtctgcacgtggataacttgaccacttagaggccttcgttggaaacgggtttttttcatgtaaggctagacagaagaattcccagtaacttccatgtgttgtgtgcattcaactcacagagttgaacgttcccttagacagagcagatttgaaacactctatttgtgcaatttgcaagtgtagatttcaagcgctttaagatcaatggcagaaaaggagatatcttcgtttcaaaactagacagaatcattcccacaaactgcgttgtgatgtgttcgttcaactcacagagtttaacctttcttttcatagagcagttaggaaacagtctgtttgtcaattctgtaagtggatattgtgacatcttgtggccttcgttggaaacgggatttcttcatattctcctagacagaagaattctcagtaacttccttgtgttgtgtgtattcaactcacagagttgaacgatcctttacagagagcaggcttgaaacactctttttgtcgaatttgcaagtggagatttcagccgctttgaggtcaatggtagaataggaaatgtcttcttatagaaactagacagaatgattctcagaaaatcttttctgtgtgtgcgttcaactcacagagtttaacttttcttctcatagagcagttaggaaacactctgtttgtaaagtgtgcaagtggatattcagacctctttgaggccttcgttggaaacgggatttcttcatattatgctagacagaagaattctcagtaacttccttgtgttgtgtgtattcaactgacagagttgaactttcatttagagagagcagatttgaaacactgtttttgtggaatttgcaagtggagatttcaagtgctttggggccaaaggcagaaaacgaaatatcttcgtataaaaagtagacagaatcattctcagaaactgctctgcgatgtgtgcgttcaactctcagagtttaacttttcttatcattcagcagtttggaaacactctgtttgtaaagtctgcacgtggataatttgaccacttagaggccttcgttggaaacgggtttttttcctgtaaggctagacagaagaattcccagtaacttccttgtgttgtgtacattcaactcacagagttgaacgttcccttagacagagcagatttgaaacactctttttgtgcaattggcaagtggagatttcaagcgctttaaggtcaatggcagaaaaggaaatatcttcgtttcaaaactagacagaatcattcccacaaactgcgttgtgatgtgttcgttcatctcacagagtttaacctttcttttcgtagagcagttaggaaacagtctgtttgtaaattctgtaagtggatattctgacatcttgtggccttcgtgggaaacgggatttcttcatattctgctagacagaagaattctcagaaacttccttgtgttgtgtgtattcaactcaaagagttgaacgatcgtttacacagagcagacttgagacactctttttgtggaatttgtaagtggagatttcagccgctttgaggtcaatggtagaaaaggaaatatcttcatataaaaactagacagaatgattctcagaaacgtcctttgtgatgtgtgcgttcaactcacagagtttaacctttcttttcatagagcagttaggaaacactctgtgtgtaaagtctgcaagtggatattcagacctccttgaggccttcgttggaaacgggatttcttcatattctgctagacagaagaattgtcagtaacttccttgtgttgtgtgtattcacctcacagagttgaacgatcctttacacagagcagacttgaaacactctttttgtggaatttgcaagtggagatttcagccgctttgaggtcaatggtagaaaaggaaactatgttcgtatacagactagacagaatcattctcagaaactgctgcgtgatgtgtgcgttcaactcacagagtgtaagttttcttttcattcagcggtttggaaacactctgtttgtaaagtctgcacgtggatattttgaccacttagaggccttcgttggaaacgggattttttcatgtaaggctagacagaagaattcccagtaacttccttgtgttgtttgcattcaactcacagagttgaacgttcccttagacagagcagatttgaaacactctatttgtgcaatttgcaagtgtagatttcaagcgctttaaggtcaatggcagaaaaggaaatatcttcgtttcaaaactagacagaatcattctcagaaactgctctgcgatgtgtgcgttcaactctcagagtttaacttttcttttcattcagcagtttggaaacagtctgtttgtaaagtctgcacatggataacttgaccacttagaggccttcgttggaaacgggtttttttcatgtaaggctagacagaagaattctcagtaacttccttgtgttgtgtgtattcaactcacagagttgaacgatcctttacacagagcagacttgtaacactctttttgtggaatttgcaagtggagatttcagccactttgaagtcaaaggtagaaaaggaaataacttcctataaaaactagacagaatgattctcagaaaatcttttgtgatgtgtgcgttcaactcacagagtttaacttttcttctcatagagcagttaggaaacactctgtttgtaaagtctgcaagtgtatattcagacctctttgaggccttcgttggaaacgggatttcttcatattatgctagacagaagaattctcagtaacttccttgtgttgtgtgtattcaactcacagagttgaaggatcctttacagagagcaggcttgaaacactctttttgtcgaatttgaaagtggagatttcagccgctttgaggtcaatggtagaataggatatatcttcttatacaaactagacagaatcattctcagaaactgctctgcgaagtgtgcgttcaactctcagagtttaacttatcttttcattcagcagtttggaaacactctgtttgtaaagtctgcacgtggataatttgaccacttagaggtcttcgttggaaacgggtttttttcatgtaaggctagacagaagaattcccagtaatttccttgtgttgtgtacattcaactcacagagttgaacgttcccttagacagagcagacttgtaacactctttttgtggaatttgcaagtggagatttcagccgctttaaagtcaaaggtagaaaaggaaatatcttcctataaaaactagacagaatcattcccacaaactgcgttgtgaagtgttcgttcaactcacagagtttaacctttctgttcatagagcagttaggaaacactctgtttgtaaagtctgaaagtggatattctgacatcttgtggccttcgttggaaacgggatttctgcatattctgctagacagaagacttctcagtaacttccttgtattgtgtgtattcagctcacagagttgaacgatcctttacacagagcagacctgaaacactctttttgtggaatttgcaagtggagatttcagccgctttgaggtcaatggtagaataggaaatatcttcctatagaaactagacagaatgattctcagaaacttctttgtgatgtgtgcgttcaactcacacagtttaacctttcttttcatagagcagttaggaaacactctgtttgtaaagtctgcaagtggatattcagacctccttgaggccttcgttggaaacgggatttcttcatattatgctagacagaagaattctcagtaacttccttgtgttgtgtgtattcaactgacagagttgaactttcatttagagagagtagatttgtaacactgtttttgtggaatttgcaagtggagatttcaagcgctttggggccaaaggcagaaaaggaaatatcttcgtataaaaactagacagaatcattctcagaaactgctctgcgatgtgtgcgttcaactctcagagtttaacttttcttttcattcagcagtttggaaacactctgtttgtaaagtctgcacgtggatattttgaccacttagaggccttcgttggaaacgggtttttttcctgtaaggctaaaaagaagaattcccagtaacttccttgtgttgtgtgcattcaactcacagagttgaacgttcccttagacagagcagatttgaaacactctatttgtgcaatttgcaagtgtagatttcaagcgctttaaggtcaacggcagaaaaggaaatatcttcgtttcaaaactagacagaatgattctcagaaactcctttgtgatgtgtacgttcaacacacagagtttaacttttcttttcatagagcagttaggaaacactctgtttgtaaagtctgcaagtggatattcagacctctttgaggccttcgttggaaacgggatttcttcatattatgctagacagaagaattctcagtaacttccttctgttgtgtgtattcaactcacagagttgaacgatcctttacagagagcagacttgaaacattctttttgtggaatttgcaagtggagatttcagccgctttgaggtcaattgtagaaaaggaaatatcttcgtataaagactagacagaatgattctcagaaactcctttgtgatgtgtgcgttcaactcacagagtttaacctttcttttcatagagcagttaggaaacactctgtaaagtctgcaagtggatattcagacctccttgaggccttcgttggaaacgggatttcttcatattctgctatacagaagaattcccagtaacttccttgtgttgtgtgtgttcaactcacagtgttgaactttcatttatacagagcagattggaaacactctttttgtggaatttgcaagtggagatttcaagcgctttgaggccaaaggcagaaaaggaaatatcttcgtataaaaactagacagaaatcattctcagaaactgctgcgtgatgtgtgcgttcaactctcagagtttaacttttcttttcattcagcggtttggaaacactctgtttgtaaagtctgcatgtggaaattttgaccacttagaggccttcgttggaaacgggtttttttcatgtaaggctagacagaagaattcccagtaacttccttgtgttgtgtgcattcaagtcacagagttgaacgttcccttagacagagcagatttgaaacactctatttgtgcaatttgcaagtgtagatttcaagcgctttaaggtcaacggcagaaaaggaaatatcttcgtttcaaaactagacagaatcattcccacaaaccgcgttgtgatgtgttcgttcaactcacagagtttaacctttctgttcatagagcagttaggaaacactctgtttgtaaagtctgccagtggatattcagacctccttgaggccttcgttggaaacgggatttcttcatattctgctagacagaagaattctcagtaacttccttgtgttatgtgtattcaactcacagagttgaacgatcctttacacagagcacacttgaaacactctatttgtagaatttgcaagtggagatttcagccgctttgaggtcaatagtagaaaaggaaatatcttcgtagaaaaactagacagaatgattctcagaaactcctttgtgatgtgtgtgttcaactcacagagttcaacctttcttttcatagagcagttagtaaacactctgtttataaagtctgcaagtggatattcagacccctttgaggccttcgttggaaacgggatttcttcatattatgctagacagaagaattctcagtaacttctttgtgttgtgtgtattcaactgacagatttgaactttcatttagagagagcagatttgaaacactgtttttgtggaatttgcaagtggagatttcaagcgctttggggccaaagtcagaaaaggaaatattcttcgtataaaaactagacagaatcattctcagaaactgctctgcgatgtgtctgttcaaagctcagagtttaacttttcttttcattcagcagtttggaaacactctgtttgtaaaatctgcacgtggataacttgaccacttagaggccttcgttggaaacgggtttttttcatgtaaggctagacagaagaattcccagtaacttccttctgttgtgtacattcaactcacagagttgaacgttcccttagacagagcagatttgaaacactctttttgtgcaattggcaaatggagatttcaagcgctttaaggtcaatggcagaaaaggaaatatcttcgtttcaaaactagacagaatgattctcagaaacttctttgtgatgtgtgcgtccaactcacagagtttaacctttcttttcatagagcagttaggaaacactctgtttgtaaagtctgcaagtggataatcagacctctttgaggccttcgttggaaacgggatttcttcatactatgctagacagaagaattctcagtaacttccttgtgttgtgtgtattcaactcacagagttgaacgatcctttacacagagcagacttgtaacactctttttgtggaatttgcaagtggagatttcagccgctttgaagtcaaagttagaaaaggaaatatcttcctataaaaactagacagaatgattctcagaaactcctttgtgatgggtgctttcaactcacagagtttaacctttcttttcatagagcagttaggaaacactctgtttgtaaagtctgcaagtggatattcagacctcttagaggccttcgttggaaacgggatttcttcatattatgctagacagaagaattctcagtaacttcccttgtgttgtgtgtattcaactgacagagttgaactttcatttagagagagtagttttgaaacactgtttttgtggaatttgcaagtggagatttcaagcgctttggggccaaaggcagaaaaggaaatatcttcgtataaaaactagacagaatcattctcagaaactgctgcgtgatgtgtgcgttcaactctcagagtttaacttttcttttcattcagcggtttggaaacactctgtttgtaaagtctgcacgtggaaattttgaccacttagaggccttcgttggaaacgggtttttttcatgtaaggctagacagaagaattcccagtaacttccttgtgttgtgtgcattcaactcacagagttgaacgttcccttagacagagcagatttgaaacactctatttgtgcaatttgcaagtgtagatttcaagcgctttaaggtcaaaggcagaaaaggaaatatcttcgtttcaaaactagacagaatcattcccacaaactgcgttgtgatgtgttcgttcaactcacagagtttaacctttctgttcatagagcagttaggaaacactctgtttgtaaagtctgtaagtggatattctgacatcttgtggccttcgttggaaacgggatttcttcatatttcgctagacagaagaattctcagtaacttccttgtgttgtgtgtattcaactcacagagttgaacgatcctttacactgagcagacttgaaacattctttttgtggaatttgcaagtggagatttcagccgctttgaggtcaatggtagaataggaaatatcttcctatagaaactagacagaacgattctcagaaactcctttgtgatgtgtgtgttcaactcacagagtttaacctttcttttcatagagcagttaggaaacactctgtttgtaaagtctgcaagtggatattcagacctctttgaggccttcgttggaaacgggatttcttcatattctgctagacagaagaattctcagtaacttccttgtgttgtgtttattcaactgacagagttgaactttcatttagagagagcagatttgaaacactgtttttgtggaatttgcaagtggagatttcaagcgctttggggccaaaggcagaaaacgaaatatcttcgtataaaaactagacagaatcattctcagaaactgctgcgtgatgtgtgcgttcaactctcagagtttaacttttcttttcattcagcggtttggaaacactctgtttgtaaagtctgcacgtggatattttgaccacttagaggccttcgttggaaacgggttttttgcatgtaaggctagacagaaagaattcccagtaacttccttgtgttgtgtgcattcaactcacagagttgaacgttcccttagacagagcagatttgaaacactctatttgtgcaatttgcaagtgtagatttcaagcgctttaaagtcaatggcagaaaaggaaatatcttcgtttcaaaactagacagaatgattctcagaaactcctttgtgatgtgtgtgttcaactcacagagtttaactttccttttcatagagcagttaggaaacactctgtttgtaaagtctgcaagtggatattcagacctctttgaggccttcgttggaaacgggatttcttcatattatgctagacagaagaattctcagtaacttccttgtgttgtgtgtattcaactcacagagttgaacgatcctttacacagagcagacttgaaacagtctttttgtggaatttgcaagtggagatttcagccgctttgaggtcaatggtagaaaaggaaatctcttcgtataaagactagacagaatgattctcagaaactcctttgtgatgtgtgcgttcaactcacagagtttaacctttcttttcatagagcagttaggaaacactctgtttgtaaagtctgcaagtggatattcagacctccttgaggccttctttggaaacgggatttcttcttattctgctaggcagaagatttcccagtaacttccttgtgttgtgtgtgttcaactcacagagttgaactttcatttacacagagcagatttggaacactctttttgtggaatttgcaaatggagatttcaagcgctttgaggccaaaggcagaaaaggaaatatcttcgtataaaaactagacagaatcattctcagaaactgctgcgtgatgtgtgcgttcaactctcagagtttaacttttcttttcattcagcgctttggaaacactctgtttgtaaagtctgcacgtggaaattttgaccacttagaggccttcggttggaaacgggtttttttcatgtaaggctagacagaagaattcccagtaacttccttgtgttgtgtgcattcaactcacagagttgaacgttcccttagacagagcagatttgaaacactctatttgtgcaatttgcaagtgtagatttcaagcgctttaaggtcaatggcagaaaaggaaatatcttcgtttcaaaactaggcagaatcattcccacaaactgcgttgtgatgtgtttgttcaactcacagagtttaacctttcttttcatagagcagttaggaaacagtctgtttgtaaattctgtaagtggatattctgacatcttgtggccttcgttggaaacgggattacttcatattctgctagacagaagaattctcagtaacttccttgtgttttgtgtattcaactcacagagttgaacgatcatttacacaaagcagacttgaaacacactttttgtggaatttgcaagtggagatttaagccgctttgaggtcaatggtagaataggaaatatcttcctatagaaactagacagaatgattctcagaaactcctttgtgatgtgtgcgttcaactcacagagttcaacctttcttttcatagagcagttgggaaacactctgtttgtaaagtctgcaagtggatattcagacttctttgaggtcttcgttggaagcgggatttcttcatattctgctagacagaagaattctcagtaacttccttgtgttgtgtgtattcaactgacagagttgaactttcatttagagagagtagatttgaaacactgtttttgtggaatttgcaagtggagatttcaagcgctttggggccaaaggcagaaaaggaaatatcttcatataaaaactagacagaatcattctcagaaaactgctgcgtgatgtgtgcgttcaactctcagagtttaacttttcttttcattcagcggtttggaaacactctgtttgtaaagtctgcacgtggaaattttgaccacttagaggccttcgttggaaacgggtttttttcatgtaaggctagacagaagatttcccagtaaattccttgtgttgtgtacattcaactcacagagttgaacgttcccttagacagagcagatttgaaacactctttttgtgcaattggcaagtggagatttcaagcgctttaaggtcaatggcagaaaaggaaatatcttcgtttcaaaactagacagaatcattcccacaaactgcgttgtgatgttttcgttcaactcacagagtttaacctttccgttcatagagcagttaggaaacacactgtttgtaaagtctgtaagtggatattctgacatcttgtggccttcgttggaaacgggatttctttatattctgctagacagaagaattctcagaaacttccttgtgttgtgtgttttcaactcacagtgttgaacgatcctttacacagagcagacttgaaacactctttttgtgggatttgcaagtggagatttcagccgctttgaggtctatggtagaaaaggaaatatcttcgtataaaaactagacagaatgattctcagaaactcctttgtaatgtgtgcgttcaactcacagagtttaacgtttcttttcatagagcagttaggaaacactctgtttgtaaagtctgcaagtggatattcagacctctttgaggccttcgttggaaacgggtttttttcatataaggctagacagaagaattctcagtaacttccttgtgttgtgtgtattcagctgacagagttgaactttcatttagagagagcagatttgaaacactgtttttgtgtaatttgcaattggagatttcaagcgctttggggccaaaggcagaaaaggaaatatcttcgtataaaaactagacagaatcattctcagaaactgctgcgtgatgtgtgcgttcaactctcagagtttaacctttcttttcattcagcggtttggaaacactctgtttgtaaagtctgcacgtggatattttgaccacttagaggccttcgttggaaacgggtttttttcatgtaaggctagacagaagaattcccagtaacttccttgtgttgtgtacattcaactcacagagttgaactgttcccttagacagagcagatttgaaacactctttttgtgcaattggcaaatggagatttcaagcgctttaaggtcaatggcagaaaaggaaatatcttcgtttcaaaactagacagaatcattctcagaaactgctctgcgatgtgtgcgttgaactctcagagtttaacttttcttttcattcagcagtttggaaacactctgtttgtgaagtctgcacgtggatattttgaccatttagaggccttcgttggaaacgggtttttttcctgtaaggctagacagaagaattcccagtaacttccttgtgttgtgtacattcaactcacagagttgaacgttcccttagacagagcagacttgtaacactctttttgtggaatttgcaagtggagatttcagccgctttcaagtcaaaggtagaaaaggaaatatcttcctataaaaactagacagaatgattctcagaaactcctttgagatgtgtgcgctcaactcacagagtttaacctttcgtttcatagagcagttaggaaacactctgtttgtaaagtctgcaagtggatattcagacctctttgaggccttcgttggaaacgggtttttttcaaataaggctagacagaagaattctcagtaacttccttgtgttgtgtgtattcaactgacagagttgaactttcatttagagagagcagatttgaaacactgtttttgtggaatttgcaaatggagatttcaagcgctttggggccaaaggcagaaaaggaaatatcttcgtataaaaactagacagaatcattctcagaaactgctctgcgatgtgtgcgttcaactctcagagtttaacttttcttttcattcagcagtttggaaacactctgtttgtaaagtctgcacgtggatattttgaccacttagaggccttcgttggaaacgggttattttcctgtaaggctagacagaagaattcccagtaacttccttgtgttgtgtgcattcaactcacagagttgaacgttcccttagacagagcagatttgaaacactctatttgtgcaatttgcaagtgtagatttcaggcgctttaaggtcaacggcagaaaaggaaatatcttcgtttcaaaactagacagaatgattctcagaaactcctgtgtgaagtgtgtgttcaactcacagagtttaacctttctattcatagagtagttaggaaacactctgtttgtaaagtctgcaagtggatattttgacctctttgaggccttcgttggaaacgggtttttttcatgtaaggctagacagaagaattctcagtaactttccttgtgttgtgtgtattcaactcacagagttgaacgatcctttacacagagcagacttgtaacactctttttgtggaatttgcaaggggagatttcagccgctttgaagtcaaaggtagaaaaggaaatatcttcctataaaaactagacagaatgattctcacaaactcctttgtgatgtgtgcgttcaactcacagagtttaacctttcttttcatagagcagttaggaaacactctgtttgtaaagtctgcaagtggatattcagacctccttgaggccttcgttggaaacgggatttcttcatattctgctagacagaagaattcccagtaacttccttgtgttgtgtgtgttcaactcacagagttgaactttgatttacacagagcagatttgaaacactctttttgtggaatttgcaagtagagatttcaagcgctttgaggccaaaggcagaaaaggaaatatcttcgtataaaaactagacagaatcattctcagaaactgctctgcgatgtgtgcgttcaactctcagagtttaacttttcttttcattcagcagtttggaaacactctgtttgtaaagtctgcacgtggatattttgaccacttagaggccttcgttggaaacgggtttttttcctgtaaggctagatagaagaattcccagtaacttccttgtgttgtgtacattcaactcacagagttgaacgttcccttagacagagcagatttgaaacactctttttgtgcaattagcaagtggagatttcaagcgctttaaggtcaatggcagaaaaggaaatatcttactttcaaaactagacagaatgattctcagaaactcctttgtgatgtgtgcgttcaactcaaagagtttaacttttcttttcacagagcagttaggaaacactctgtttgtaaagtctgcaagtggatattcagacctatttgaggccttcgttggaaacgggatttcttcatattatgctagacagaagaattctcagtaacttccttgtgttgtgtgtattcaaatcacagagttgaacgatcctttacacagagcagacttgaaacattctttttgtggaatttgcaagtggagatttcagccgctttgaggtcaatggtagaataggaaatatcttcctatagaaactagacagaatgattctcagaaactcctttgtgatgtgtgcgttcaactcacagagtttaacctttcttttcatagagcagttaggaaacaatctgtttgtaaagtctgcaagtggatattcagacctctttgaggccttcgttggaaacgggtttttttcatataaggctagacagaagaattcccagtaacttccttgtgttgtgtgtgttcaactcacagagttgaactttcatttacacagagcagatttgaaacactctttttgtggaatttgcaagtggggatttcaagcgctttgaggccaaaggcagaaaaggaaatatcttcgtataaaaactagacagaatcattctcagaaaccgctctgtgatgtgtgcgttcaactctcagagtttaacttttcttttcatttagcagtttggaaactctcgggttgtaaagtctgcacgtggatattttgaacacttagaggccttcgttggaaacgggtttttttcatgtaaggctagacagaaaaattcccagtaacttccttgtgttgtgtgcattcaactcacagagatgaacgttcccttcgacagagcagatttgaaacactctatttgtgcaatttgccagtgtagatttcaagcgctttaaggtcaatggcagaaaaggaaatatcttcgtttcaaaactagacagaacgattctcagaaactcctttgtgatgtgtgcgttcaactcacagagtttaacctttcttttcatagaacagttaggaaacactctgtttgtaaagtctgcaagtggatattcagacctctatgaggccttcgttggaaacgggatttcttcatattctgctagacagaagaattctcagtaacttccttgtgttgtgtgtattcaactcacagagttgaacgatcctttacacagagcagacttgaaacactctttttgtggaatttgcaagtggaggtttcagccgctttgaggtcaatagtagaaaaggaaatatcttcgtagaaaaactagacagaatgattctcagaaactcctttgggatgtgtgcgttcaactcacagagtttaacctttctgttcatagagcagttaggaaacactctgtttgtaaagtctgcaagtggatattcagacctccttgaggccttcggtggaaacgggatttcttcatattctgctagacagaagaattcccagtaacttccttgtgttgtgtgtgttcaactcacagagttgaactttcatttacacagagcagatttgaaacactctttttgtggaatatgcaagtggagatttcaagcgctttgaggccaaaggcagaaaaggaaatatcttcgtttcaaaactagacagaatcattctcagaaactgctctgcgatgtgtgcgttcaactctcagagtttaacttttcttttcattcagcagtttggaaacactctgtttgtaaagtctgcacgtggataatttgaccacttagaggccttcgttggaaacggtttttttcatgtaaggctagacagaagaattctcagtaacttccttgtgttgtgtgtattcaactcacagagttgaacgatcctttacacagagcagacttgtaacactctttttgtggaatttacaagtggagatttcagccgctttgaagtcaaaggtagaaaaggaaatatcttcctataaaaactagacagaatcattcccacaaactgcgttgtgatgtgttcgttcaactcacagagtttaacctttcttttcatagagcagttaggaaacagtctgtttgtcaattctgtaagtggatattctgacatcttgtggccttcgttggaaacaggatttcttcatattctgctagacagaaagaattctcagtaacttccttgtgttgtgtgtattcaactcacagagttgaacgatcctttacacagagcagacttgaaacactctttttgtggaatttgcaagtggagatttcagccgctttgaggtcaatagtagaaaaggaaatatcttcgtagaaaaactagacagatgattctcagaaactcctttgtgatgtgtgcgttcaactcacagagtttaacctttcttttcatagagcagttaggaaacactctgtttgtaaactctgcaagtggatattcagacctctttgaggccttcgttggaaacgggttttcttcatattatgcctgacagaagaattcccagtaacttccttgtgttgtgtgtgttcaactcacagagttgaactctcatttacacagagcagatttgaaacactctttttgtggaatttgcaagtggagatttcaagcgctttgaggccaaagacagaaaaggaaatatcttcgtataaaaactagacagaatcattctcagaaactgctctgcgatgtgtgcgttcaactctcagagtttaacttttcttttcattcagcagtttggaaacactctgtttgtaaagtctgcacgtggatattttgaccacttagaggccttcgttggaaacgggtttttttcctgtaaggctagtcagaagatttcccagtaacttccttgtgttgtgtacattcaactcacagagttgaacgttcccttagacagagcagatttgaaacactctttttgtgcaattggcaaatggagatttcaagcgctttaaggtcaatggcagaaaaggaaatatcttcgtttcaaaactagacagattcattcccacaaactgcgttgtgatgtgttcgttcaactcacagagtttaacctttctgttcatagagcagttaggaaacactctgtttgtaaagtctgccagtggatattcagacctccttgaggccttcgttggaaacgggatttcttcatattctgctagaaagaagaattctcagtaacttccttgtgttgtgtgtattcaactcacagaattgaacgatcctttacacagagcagacttgaaacattctttttgtggtatttgcaagtggagatttcagccgctttgaggtcaatggtagaataggaaatatcttcctatagaaactagacagaatgattctcagaaactcctttgtgatgtgtgcgttcaactcacagagtttaacctttcttttcatagagcagttaggaaacactctgtttgtaaactctgcaagtggatattcagacctctttgaggccttcgttggaaacgggatttcttcatactgtgctagacagaagaattctcagtaacttccttgtgttgtgtgtattcaactcacagagttgaacgatcctttacacagagcagacttgaaacactcttcttgtggaatttgcaagtggagatttcagccgcgttgaggtcaatggtagaaaaggaaatatcttcgtataaaaactagacagaatcattctcagaaactgctctgtgatgtgtgcgttcaactctcagagtttaacttttcttttcattcagcagtttggaaacactctgtttgtaaagtctgcacgtggatattttgaccacttagaggccttcgttggaaacgggttttttcatgtaaggctagacagaagaattcccagtaacttccttgtgttgtgtacattcaactcacagagttgaacgttcccttagacagagcagatttgaaacactctttttgtgcaattggaaagtggagatttcaagcgctttaaggtcaatggcagaaaaggaaatatctccgtttcaaaactagacagaatcattcccacaagctgcgttgtgatgtgttcgttcatctcacagagtttaacgtttcttttcatagagcagttaggaaacagtctgtttgcaaattctataagtggatattctgacatcttgtggccttcgttggaaacgggatttcttcatattctgctagacagaagaattctcagtaacttccttgtgttgtgtgtattcaactcacacagttgaacgatcctttacacagagcagacttgaaacactctttttgtggaatttgcaagtggagatttcagccgctttgaggtcaacagtagaaaaggaaatatcttcgtagaaaaactagacagaatgattctcagaaactcctttgtgatgtgtgcgttcaactcacagagtttaacctttcttttcatagatcagttaggaaacactctgtttgtaaagtctgcaagtgaatattcagacatccttgaggctttcgttggaaacgggatttcttcatattctgctagaaagaagaattcccagtaacttccttgtgttgtgtgtgttcaactcacagagttgaactttcatttacacagagcagatttgaaacagtctttttgtggaatttgcaaatggagatttcaagcgctttgaggtcaaaggcagaaaaggaaatatcttcgtataaaaactagacagaatcattctcagaaactgctgcgtgatgtgtgcgttcaactctcagagtttaacttttcttttcattcagcggtttggaaacactctgtttgtaaagtctgcacgtggatattttgtccacttagaggccttcgttggaaacgggtttttttcatgtaattctagacagaagaattcccagtaacttccttgtgttgtgtgcattcaactcacagagttgaacgttcccttagacagagcagatttgaaacactctatttgtgcaatttgcaagtgtagttttcaagctctttaaggtcaacggcagaaaaggaaatatcttcgtttcaaaactagacagaatcattcccacaaactgcgttgtgatgtgttcgttcaactcacagagtttaacctttctgttcatagagcagttaggaaacactctgtttgtaaagtctgcaagtggatattcagacctctttgtggccttcgttggaaacgggatttcttcatattatgctagacagaagaattctcagtaacttccttgtgttgtgtgtattcaactcacagagttgaacgatcctttacacagagcagacttgtaacactctttttgtggaatttgcaagtggagatttcagccgctttgaagtcaaaggtagaaaaggaaatatcttcctataaaactagacagaatgattctcagaaactcctttgtgatgtgtgcgttcaactcacacagtttaaccttccttttcatagagcagttaggaaacactctgtttgtaaagtctgcaagtggatattcagacctctttgaggccttcgttggaaacgggtttttttcatataaggctagacagaagaattctccgtaacttccttgtgttgtgtgtattcaactgacagagttgaactttcatttagagagatcagatttgaaacactctatttgtgcaatttgcaagtgtagatttcaagcgcattaaggtcaatggcagaaaaggaaatatcttcgattcaaaactagacagaatcattctcagaaactgctctgcgatgtgtgcgttcaactctcagggtttaacttttcttttcattcagcagtttggaaacactctgtttgtaaagtctgcacgtggatattttgaccacttagaggccttcgttggaaacgggttttcttcctgtaaggctagacagaagaattctcagtaacttccttgtgttgtgtacattcaactcacaagagttgaacgttcccttagacagagcagatttgaaacactctttttgtgcaattggcaagtggtgatttcagccgctttgaggtcaatggtagaaaaggaaatatcttcgtataaaaactagacagaatcattcccagaaactgcgttgtgatgtgttcgttcaactcacagagtttaacctttcttttcatagagcagttaggaaacagtctgtttgtcaattctgtaagtggatattctgacatcttgtggcgttcgttggaaacgggatttcttcatattctgctagacagaagaattctcagtaacttccttgtgttgtgtgtattcaactcacagagttgaacgatcctttacacagagcagacttgaaacactctttttttggaatttgcaagtggagatttcagccgctttgaggtcaatggtagaaaaggaaactatcttcatataaagactagacagaatgattctcagaaacttctttgtgatgtgtgcgttcaactcacagagtttaacctttcttttcatagagcagttaggaaacactctgtttgtaaagtctgcaagtggatattcagacctctttgaggccttcgttggaaacgggatttcttcatactatgctagacagaagaattctcagtaacttccttgtgttgtgtgtattcaactcgcagagttgaacgatcctttacacagagcagacttgtaacactctttttgtggaatttgcaagtggagatttcagccgctttgaagtcaaaggtagaaaaggaaatatcttcctataaaaactagacagaaatcattctcagaaactgctgcgtgatgtgtgcgttcaactctcagagtttaacttttcttttcattcagcggtttggaaacactctgtttgtaaagtctgcacgtggatattttgaccacttagaggccttccttggaaacgggtttttttcatgtaaggctagacagaagaattcccagtaacttccttgtgttgtgtgcattcaactcacagagttgaacgttcccttagacagagcagatttgaaacactctatttgtgcaatttgcaagtgtagatttcaagcgctttaaggtcaacggcagaaaaggaaatatcttcgtttcaaaactagacagaatgattctcagaaactcctttgtgatctgtgcgttcaactcacagagtttaacttttcttttcatagagcagttaggaaacactctgtttgtaaagtctgcaagtggatattcagagctctttgaggccttcgttggaaacgggatttcttcatattctgctagacagaagaattctcagtagcttccttgtgttgtgtgtattcaactcacagagttgaacgatcctttacagagagcagacttgaaacactctttttgtggaatttgcaagtggagatttcagccgctttgaggtcaatggtagaataggaaatatcttcctatagaaactggacagaatgattctcagaaactcctttgtgatgtgggcgttcaactcacagagtttaacctttcttttcatagagcagttaggaaacactctgtttgtaaagtctgcacgtggatatttggacttctttgaggccttcgttggaaacggttttttttcatgtaaggctagacagaagaattctcagtaactttccttgtgttgtgtgtattcaactgacagagttgaactttcatttagagagagctgatttgaaacactgtttttgtggaatttgcaagtggagatttcaagcgctttggggccaaaggcagaaaaggaaatatctttgtataaaaactagacagaagcattctcagaaactgctctgcgatgtgtgcgttcaactctcagagtttaacttttcttttcattcagcagtttggaaacactctgtttgtaaagtctgcacgtggataatttgaccacttagaggccttcgttggaaacgggtttttttcatgtaaggctagacagaagaattcccagtaacttccttgtgttgtgtacattcaactcacagagttgaacgttcccttagacagagcagatttgaaacactctttttgtgcaattggcaagtggagatttcaagcgctttaaggtcaatggcagaaaaggaaatatcttcgtttcaaaactagacagaatcattcccacaaactgcgttgtgatgtgttcgttcaactcacagagtttaacctttcttttcatagagcagttaggaaacagtctgtttgtcaattctgtaagtggatattcagacctctttgaggccttcgttggaaacgggatttcttcatactatgctagacagaggaattctcaggaacttccttgtgttgtgtgtattcaactcacagagttgaacgatcctttacacagagcagacttgaaacactcttttggtggaatttgcaagtggagatttcagccgctttgagttcaatggtagaataggaaatatcttcctatagaaactacacagaatgattctcagaaactgctttgtgatgtgtgcgttcaactcacagagttcaacctttcttttcatagagcagttgggaaacactctgtttgtaaagtctgcaagtggatattcagacttctttgaggccttcgttggaagcgggatttcttcatgttctgctagacagaagaattcccagtaacttccttgtgttgtgtgtgttcaactcacagagttgaactttcatttacacagagcagatttgaaacactctttttgtggaatttgcaggtggagatttcaagcgctttgaggccaaaggccgaaaaggaaatatcttcgtataaaaactagacagaatcattctcagaaactgctctgcgatgtgtgcgttcaactctcagagtttaactttgcttttcattcagcagtttggaaacactctgtttgtaaagtctgcacgtggataatttgaccacttagaggccttcgttggaaacgagtttttttcatgtaaggttagacagaagaattctcagtaacttccttgtgttgtgtacattcaactcacaagagttgaacgttcccttagacagagcagatttgaaacactctttttgtgcaattggcaagtggtgatttcagccgctttgaggtcaatggtagaaaaggaaatatcttcgtataaaaactagacagaatgattctcagaaactcctttgtgatgtgtgcgttcaactcacagagttcaacctttcttttcatagagcagttgggaaacattctgtttgtaaagtctgcaagtggatattcagacttctttgaggccttcgttggaagcgggatttcttcatattctgctagacagaagaattctcagaaacttccttgtgttgtgtgttttcaactcacagagttgaacgatcctttacacagagcagacttgaaacactccttttgtggaatttgcaagtggagatttcagccgctttgaggtcaatggtagaataggaaatatcttcctatagaaactagacagaatgattctcagaaactcctttgtgatgcgtgcgttcaactcacagagtttaacttttcttttcatagagcagttaggaaacactctgtttgtaaaggctgcaagtggatattcagacccctttgaggccttcgttggaaacgggatttcttcatattatgcgagacagaagaattctcagtaacttccttgtgttgtgtgtattcaactcacagagttaaacgatcctttacacagagcagacttgaaacactctttttgtggaatttgcaagtggagatttcagccgctttgaggtcaatagtagaaaaggaaatatcttcgaagaaaaactagacagaatcattctcagaaactgctctgcgatgtgtgcgttcaactctcagagtttaacttttcttttcattcagcagtttggaaacactctgtttgtaaagtctgcacgtggatattttgaccacttagaggccttcgttggaaacgggtttctttcctgtaaggctagacagaagaattcccagtaacttccttgtgttgtgcgcattcaactcacagagttgaacgttcccttagacagagcagatttgaaacagcctatttgtgcaatttgcaagtgtacatttcaagcactttaaggtcaacggcagaaaaggaaatatcttcgtttcaaaactagacagaatgattctcagaaactcctttgtgatgtgtgcgttcaactcacagagtttaacctttcttttcacagagcagttaggaaacactctgtttgtaaagtctgcaagtagatattcagacctctttgaggccttcgttggaaaagggatttcttcatattatgctagacagaagaattctcagaaacttccttgtgttgtatgtattcaactcacagagttgaacgatcctttacacacagcagacttgaaacactctttttgtggaatttgcaagtggagatttcagccgctttgtgttcaatggtagaaaaggaaatatcttcgtataaaaactagacagaatgattctcagaaactcctttgtgatgtgtgcgttcaactcacagagtttaacctttcttttcatagagcagttgggaaacactctgtttgtaatgtctgcaagtggatattcagacatccttgaggctttcgttggaaacgggatttcttcatattctgctagaaagaagaattctcagtaacttccttgtgttgtgtgtattcaactgacagagttgaactttcatttagagagagcagatttgaaacactgtttttgtggaatttgcaagtggagatttcaagcgctttggggccaaaggccgaaaaggaaatatcttcgtataaaaactagacagaatcattctcagaaactgctgcgtgatgtgtgcgttcaactctcagagtttaacttttcttttcattcagcggtttggaaacactctgtttgtaaagtctgcacgtggatattttgaccacttagaggccttcgttggaaacgggtttttttcatgtaaggctagacagaagaattcccagtaacttccttgtgttgtgtacattcaactcacagagttgaacgttcccttagacagagcagatttgaaacactctttttgtgcaattggcaagtggagatttcaagcgctttaaggtcaatggcagaaaaggaaatatcttcgtttcaaaactagagagaatgattctcatgaactcctttgtgatgtgtgcgttcaactcacagagtttaacctttgttttcatagagcagttaggaaacactctgtttgtaaagtctgcaagtggatattcagacctccttgaggccttctttggaaaagggatttcttcatattctgctagacagaagaattctcagtaacttccttgtgttgtgtgtattcaactcacagagttgaatgatcctttacacagagcagacttgaaacactctttttgtggaaattgcaagtggagatttcagccgctttgaggtcaatggtagaaaagtaaatatcttcgtataaagactagacagaatgattctcagaaactcctttgtgatgtgtgcgttcaactcacagaatttaacatttcttttcatagagcagttaggaaacactctgtttgtaaagtctgtaagtggatattcagacctctttgaggccttcgttggaaacgggatttcttcgtattctgctggacagaagaattctcagtaacttcccttgtgttgtgtgtattcaactgacagagttgaactttcatttagagagagcagatttgaaacactgtttttgtggaatttgcaagtggagatttcaagcgcttcggggccaaaggcagaaaaggaaatatcttcgtataaaaactagacagaatcattctcagaaactgctgcgtgatgtgtgcgttcaactctcagagtttaacttttcttttcattcagcggtttggaaacactctgtttgtaaagtctgcacgtggatattttgaccacttagaggccttctttggaaacgggtttttttcatataaggctagacagaagatttcccattaaattccttgtgttgtgtacattcaactcacagagttgaacgttcccttagacagagcagatttgaaacactctttttgtgcaattggcaagtggagatttcaagcgctttaaggtcaatggcagaaaaggaaatatcttcgtttcaaaactagacagaatcattcccacaaactgcgttgtgatgtgttcgttcaactcacagagtttaacctttccgttcatagagcggttaggaaacactctgtttgtaaagtctgtaagtggatattctgacatcttctggccttcgttggaaacgggatttcttcatattctgctagacagaagaattctcaagtaacttccttgtgttgtgtgtattcaactcacagagttgaacgatcctttacacagagcagacttgtaacactctttttgtggaatttgcaagtggagatttcagccgctttgaagtcaaaggtagaaaaggaaatatcttcctataaaaactagacagaatgatcctcagaaactcccttgtgatgtgtgcgttcaactcacagactttaaactttcttttcatagagcagttaggaaacactctgtttgtaaagtctgcaagtggatattcagacctccttgaggccttcgttggaaacgggatttcttcatattatgctagacagaagaattctcagtaacttccttgtgttgtgtgtattcaactgacagagttgaactttcatttagagagagcagatttgaaacactgtttttgtggaatttgcaagtggagatttcaagcgctttggggccaaaggcagaaaaggaaatatcttcgtatgaaaactaggcagaatcattctcagaagctgctgcgtgatgtgtgcgttcaactctcagagtttaacttttcttttcattcagcggtttggaaacactctgtttgtgaagtctgcacgtggatattttgaccacttagaggccttcgttggaaacgggttttttgcatgtaaggctagacagaagaattcccagtaacttccttgtgttgtgtgcattcaactcacagagttgaacgttcccttagacagagcagatttgaaacactctatttgtgcaatttgcaagtgtagatttcaagcgctttaaggtcaatggcagaaaaggaaatatcttcgtttgaaaaatagacagaatcattcccacaaactgcgttgtgatgtgttcgttcaactcacagagtttaacttttcttttcatagagcagttaggaaacactctgtttgtaaagtctgtaagtggatattcagacctctttgaggccttcgttggaaacgggatttattcatattctgctagacagaagaattctcagtaactgccttgtgttgtgtgtattcaactcacagagttgaacgatcctttacacagagcagacttgaaacactctttttgtggaatttgcaaggggagatttcagccgctttgaggtcaatggtagaataggaaatatcttcctatagaaactagacagaatgattctcagaaactcctttgtgatgtgtgcgttcaactcacagagtttaacctttcttttcatagagcagttaggaaacactctgtttgtaaagtctgcaagtggatattcagacctctttgaggccttcgttggaaacgggatttcttcatataaaatctagacagaagaattcccagtaacttccttgtgttgtgtgtgttcaactcacagagttgaactttcatttacacagagcagatttgaaacactctttttgtggaattcgcaagtggagatttcaagcgctttgaggccaaaggcagaaaaggaaatatcttcgtttcaaaactagacagaatcattctcagaaactgctgcgtgatgtgtgcgttcaactctcagagtttaacttttcttttcattcagcggttttgaaacactctgtttgtaaagtctgcacgtggatattttgaccacttagaggccttcgttggaaacgggtttttttcatgtaaggctagacagaagaattcccagtaacttccttgtgttgtgtgcattcaactcacagagttgaacgtttccttagacagagcagatttgaaacaatctatttgtgcaatttgcaagtgtagatttcaagcgctttaaggtcaatggcagaaaaggaaatatcttcgtttcaaaactagacagaatcattcccacaaactgcgttgtgatgtgtgcgttcaactcaaagagtttaacctttcttttcatagagcagttaggaaacactctgattgtaaagtctgcaagtggatattcagacctccttgaggccttcgttggaaacgggatttcttcatattctgctagacagaagaattctcagtaactatcttgtgttgtgtgtattcaactcacagagttcaacgatcctttacacagagcagacttgaaacactctttttgtggaatttgcaagtggagatttcagccgctttgaggtcaatggtagaataggaaatatcttcccatagaaactagacagaatgattctcagaaactcctttgtgatgtgtgcgttcaactcacagagttcaacctttgttttcctagagcagttgggaaacactctgtttgtaaagtctgcaagtggatattcagacttctttgaggccttcgttggaagcgggatttcttcatgttctgctggacagaagaattcccactaacttccttgtgttgtgtgtgttcaactcacagagttgaactttcatttacacagagcagatttgaaacactctttttgtggaatttgcaagtggagatttcaagcgctgtgaggccaaaggcagaaaaggaaatatcttcgtataaaaactagacagaatcattctcagaaactgctctgcgatgtgtgcgttcaactctcagagtttaacttttcttttcattcagcagtttggaaacactctgtttgtaaagtctgcacgtggatattttgaccacttagaggccttcgttggaaacgggtttttttcctgtaaggcatagacagtagaattcccagtaacttccttgtgttgtgtacattcaactcacagagttgaacgttcccttagacagagcagatttgaaacactctttgtgcaattggcaagtggagatttcaagcgctttaaggtcaatggcagaaaaggaaatatcttcgtttcaaaactagacagaatcattcccacaaactgcgttgtgatgtgttcgttcaactcacagcagtttaacctttctgttcatagagcagttaggaaacactctgtttgtaaagtctgtaagtggatattctgacatcttgtggccttcgttggaaacgggatttcttcattttctgctagacagaagaattctcagtaactgccttgtgttgtgtgtattcaactcacagagttgaacgatcctttacacagagcagacttgaaacaatctttttgtggaatttgcaagtggagatttcagccactttgaggtcaatggtagaataggaaatatcttcctatagaaactagacagaatgattctcagaaactcctttgtgatgtgtgtgttcaactcacagagtttaacctttcttttcatagagcagttagtaaacactccgtttataaagtctgcaagtggatattcagacccctttgaggccttcgttggaaacgggatttcttcatattatgctagacagaagaattcccagtaacttccttgtgttgtgtgtgttcaactcacagagttgaactttcatttacacagagcagatttgaaacactctttttgtggaatttgcaggtggagatttcaagcgctttgaggccaaaggcagaaaaggaaatatcttcgtataaaaactagacagaaatcattctcagaaactgctctgcgatgtgtgcgttcaactctcagagtttaacttttcttttcattcagcagtttggaaacactctgtttgtaaagtctgcacgtggataatttgaccacttagaggccttcgttggaaacgggtttttttcatgtaaggctagacagaagaattcccagtaacttccttgtgttgtgtacattcaactcacagagttgaacgttcccttagacagagcagatttgaaacactctttttgtgcaattggcaagtggagatttcaagcgctttaaggtcaatggcagaaaaggaaatatcttcgtttcaaaactagacagaatgattctgagaaactcctttgtgatatgtgcgttcaactcacagagtttaacctttcttttcatagagcagttaggaaacactctgattgtaaagtctgcaagtggatattcagacctccttgaggccttcgttggaaacgggatttcttcctattatgctagacagaagaattctcagtaacttccttgtgttgtgtgtattcaactcacagagttgaatgatcctttacacagagcagacttgaaacactctttttgtggaatttgcaagtggagatttcagccgctttgagttcaatggtagaataggaaatatcttcctatagaaactagacagaatgattctcagaaactcctttgtgatgtgtgcgttcaactcacagagtttaacctttcttttcatagagcagttaggaaacactctgtgtgtaaagtttgcaagtggatattcagacctctttgaggccttcgttggaaacgggtttttttcatataaggttagacagaagaattctcagtaacttccttgtgttgtgtgtattcaactcacagagttgaatgatcctttacacagaacagacttgaaacactctttttgtggaatttgcaagtgcagatttcagccgctttgaggtcaagggtagaaaaggaaatatcttcgtacaaaaactagacagaatcattctcagaaactgctgcgtgatgtgtgcgttcaactctcagagtttaacttttcttttcattcagcggtttggaaacactctgtttgtaaagtctgcacgtggaaattttgaccacttagaggccttcgttggaaacgggtttttttcatgtaaggctagacagaagaattcccagtaacttccttgtgttgtgtgcattcaactcacagagttgaacgttcccttagacagagaagatttgaaacactctatttgtgcaatttgcaagtgtagatttcaagcgctttaaggtcaacggcagaaaaggaaatatcttcgtttcaaaactagacagaatcattaccacaaactgcgttgtgatgtgttcgttcaactcacagagtttaacctttctcttcatagagcagttaggaaacactctgtttgtaaagtctgcaagtggatattcagacctccttgaggccttcgttggaaacgggatttcttcatattatgctagacagaagaattcctcagtaacttccttgtgttgtgtgtattcaactcacagagttgaatgatcctttacacagagcagacttgaaacactctttttgtggaatttgcaagtggagatttcagccgctttgaggtcaatggtagaataggaaataacttcctatagaaactagacagaatgattctcagaaactcctttgtgatgtgtgtgttcaactcacagagttcaacctttcttttcatagagcagttgggaaacactctgtttgtaaagtctgcaagtggatattcagacctccttgaggccttcgttggaaacgggatttcttcatattatgctagacagaagaattctcagtaacttccttgtgttgtgtgtattcaactgacagagttgaactttcatttggagagagcagatttgaaacactgtttttgtggaatttgcaagtggagatttcaagcgctttggggccaaaggcagaaaaggaaatatcttcgtataaaaactagacagaatcattctcagaaaatcctctgtgatgtgtgctttcaactctcagagtttaacttttcttttcattcagcagtttggaaacactctgtttgtaaagtctgcacgtggatattttgaccacttagaggccttcgttggaaacgggtttttttcatgtaagggtagacagaagaattcccagtaacttccttgtgttgtgggcattcaactcacagagttgaacgttcccttagacagagcagatttgaaacactctatttgtgtaatttgcaagtgtagatttcaagcgctttaaggtcaacggcagaaaaggaaatatcttcgtttcaaaactagacagaatcattcccacaaacggcgttgtgatgtgttcgttcaactcacagagtttaacctttctgttcatagagcagttaggaaacactctgtttgtaaagtctgtaagtggatattctgacatcttgtggccttcgttggaaacgggatttcttcatattctgctagacagaagaattcccagtaacttccttgtgttgtgtacattcaactcacagagttgaacgttcccttagacagagcagacttgtaacactctttttgtggaatttgcaagtggagatttcagccgctttgaagtcaaaggtagaaaaggaaatatcttcctataaaaactagacagaatgattctcagaaactcctttgtgatgtgtgcgttcaactcacagagtttaacttttcttttcatagagccgttaggaaacactctgtttgtaaagtctgcaagtggatattcagacctctttgaggccttcgttggaaacgggatttcttcattttatgctagacagaagaattctcagtaacttccttgtgttgtgtgtattcagctgacagagttgaactttcatttagagagagcagatttgaaacactgtttttgtgtaatttgcaattggagatttcaagcgctttggggccaaacccagaaaaggaaatatcttcgtataaaaactagacagaatcattctcagaaactgctctgcgatgtgtgctttcaactctcagagtttaacttttcttttcattcagcagtttggaaacactctgtttgtaacgtctgcacgtggatattttgaccacttagaggccttcgttggaaacgggtttttttcctgtaaggctagacagaagaattcccagtaacttccttgtgttgtgtacattcaactcacagagttgaacgttcccttagacagagcagatttgaaacactctttttgtgcaattggcaagtggagaattcaagcgctttaaggtcaatggcagaaaaggaaatatcttcgtttcaaaactagacagaatgattctcagaaactcctttgtgatgtgtgcgttcaactcacagagtttaacctttcttttcatagagcagttaggaaacactctgtttgtaaagtctgcaagtggatattcagacctccttgaggccttcgttggaaacgggatttcctcatattatgctagacagaagaattcccagtaacttccttgtgttgtgtgtattcaactcacagagttgaacgatcctttacacagagcagacttgaaacactctttttgtggaatctgcaagtggagatttcagccgctttgaggtcaatggtagaataggaaatatcttcctatagaaactagatagaatgattctcagaaactcctttgtgatatgtgtgttcaactcacagattttaacctttcttttcatagagcagttagtaaacactctgtttataaagtctgcaagtggatattcagacccctttgaggccttcgttggaaacgggatttcttcatattctgctagacagaagaattctcagtaactttccttgtgttgtgtgtattcaactgacagagttgaactttcatttagagagagcagatttgaaacactgtttttgtggaatttgccagtggagatttcaagcgcattggggccaaaggcagaaaaggaaatatcttcgtataaaaactagacagaatcattctcagaaactgctctgcgatgtgtgcattcaactctcagagtttaatttttcttttcattcagcagtttggaaacactctctttgtaaagtctgcacgtggatattttgaccacttagaggccttcgttggaaacgggttttattcctgtaaggctagacagaagaattcccagtaacttccttgtgttgtgtacattcaactcacagagttgaacgttcccttagacagagcagatttgaaacactctttttgtgcaattggcaagtggagatttcaagcgctttaaggtcaatggcagaaaaggaaatatcttcgtttcaaaaccagacagaatcattcccaaaaactgcgttgtgatgtgtgcgttcaactaacagagtttaacctttcttttcatagagcagttaggaaacactctgtttgtaaactctgcaagtggatattcagacctctttgaggccttcgttggaaacgggatttcttcatactgtgctagacagaagaattctcagtaacttccttgtgttgtgtgtattcaactcacagagttgaacgatcctttacacagagcagacttgtaacactctttttgtggaatttgcaagtggagatttcagccgctttgaagtcaaaggtagaaaaggaaataacttcctataaaaactagacagaatgattctcagaaactcctttgtgatgtgtgcgttcaactcacagagtttaacctttcttttcatagagcagttaggaaacactctgtttgtaaagtctgcaagtggatattcagacctccttgaggctttcgttggaaacgggatttcttcatattatgctagaaagaagaattctcagtaacttccttgtgttgtgcgtattcaactgacagagttgaactttcatttagagagagcagatttgaaacactctttttgtggaatttgcaagtggagatttcaagcgctttggggccaaaggcagaaaaggaaatatcttcgtataaaaactagacagaatcattctcagaaactgctgcgtgatgtgtgcgttcaactctcagagtttaacctttcttttcattcagcggtttggaaacactctgtttctaaagtctgcacgtggatattttgaccacttagaggccttcgttggaaacgggtttttttcatgtaaggctagacagaagaattcccagtaacttccttgtgttgtgtgcattcaactcacagagttgaacgttcccttagacagagcagatttgaaacactctatttgtgcaatttgcaagtgtagatttcaagcgctttaaggtcaacggcagaaaaggaaatatcttcgtttcaaaactagacagaatgattctcagaaactcctttgtgatgtgtgccttcaagtcacagagtttaacctttcttttcatacagcagttaggaaacactctgtttgtaaagtctgcaagtggattttcagacctctttgtggccttcgttggaaacgggatttcttcatattctgctagacagaagaattctcagtaacttccttgtgttgtgtgtattcaactcacagagttgaacgatcccttacacagagcagacttgaaacactcttgttgtggaatttgcaagtggagatttcagccgctttgaggtcaatggtagaaaagggaatatcttcgtatagaaactagacagaatgattctcagaaacttctttgtgatgtgtgcgttcaactcacagagtttaacctttcttttcatagagcagttaggaaacactccgtttgtaaactctgcaagtggatattcagacctctttgaggccttcattggaaacgggatttctccatactatgctagacagaagaattctcagtaacttccttgtgttgtgtgtattcagctgacagagttgaactttcatttagagagagcagatttgaaacactgtttttgtgtaatttgcaattggagatttcaagtgctttggggccaaacgcagaaaaggaaatatcttcgtataaaaactagacagaatcattctcagaaactgctctgcgatgtgtgcgttcaactctcagagtttaacttttcttttcattcagcagtttggaaacactctgtttttaaagtctgcacgtggataatttgaccacttagaggccttcgttggaaacgggtttttttcatgtaaggctagacagaagaattcccagtaacttccttgggttgtgtacattcaactcacagagttgaacgtttccttagacagagcagatttgaaacactctttttgtgcaattggcaagtggtgatttcagccgctttgaggtcaatggtagaaaaggaaatatcttcgtataaaaactagacagaatgattctcagaaactcctttgtgatgtgtgcgttcaactcacagagtttaacttttcttttcatagagcagttaggaaacactctgtttgtaaagtctgcaagtggatattcagacctccttgaggccttcgttggaaatgggatttcttcatattctgctagacagaagaattctcactaacttccttgtgttgtgtgtattcaactcacagagtagaacgatcctttacacagagcagacttgaaacactctttttgtggaatttgcaagtggagatttcagccgctttgaggtcaatggtagaaaaggaaatatcttcgtataaagactagacagaatgattctcagaaactcctttgtgatgtgtgcgttcaactcacagagattaacttttcttttcatagagcagttaggaaacactctgtttgtaaagtctgcaagtggatattcagacctctttgtggccttcgttggaaacgggatttcttcatattatgctagacagaagaattctcagtaacttccttgtgttgtgtgtattcaactgacagagttgaactttcatttagagagagcagatttgaaacactgtttttgtggaatttgcaagtggagatttcaagcgctttggggtcaaaggcagaaaaggaaatatcttcgtataaaaactagacagaatcattctcagaaactgctctgcgatgtgtgcgttcaactctcagagtttaacttttcttttcattcagcagtttggaaacactctgtttgtaaagtctgcacgtggataatttgaccacatagaggccttcgttggaaacgggtttttttcatgtaaggctaaacagaagcattcccagtaacttccttgtgttgtgtgcattcaactcacagagatgaacgttcccttagacagagcagatttgaaacgctctatttgtgcaatttgcaagtgtagatttcaagcgctttaaggtcaatggcagaaaaggtaatatcttcgtttcaaaactagacagaatgattctcagaaacttctttgtgatgtgtgcgttcaactcacagagtttaacctttcttttcatagagcagttaggaaacactctgtttgtaaactctgcaagtggatattcagacctctttgaggccttcgttggaaacgggatttctccatactttgctagacagaagaattctcagtaacttccttgtgttgtgtgtattcaactcacagagttgaacgatcctttacacagagcggacttgaaacactcgttttgtggaatttgcaagtggagatttcagccgctttgaggtcaatggtagaaaaggaaatatcttcgtataaaaactagacagaatgattctcagaaactcctttgtgatgtgtgctgttcaactcacagagtttaacctttctgttcatagagcagttaggaaacactctgtttgtaaagtctgcaagtggatattcagacctccttgaggccttcgttggaaacgggatttcttcatattctgctagacagaagaattcccagtaacttccttgtgttgtgtgtgttcaactcacagagttgaactttcatttacacagagcagatttgaaacactctttttgtggcatttgcaagtggagatttcaagggctttgaggccaaaggcagaaaaggaaatatcttcgtttcaaaactagacagaatcattctcagaaactcctttgtgatgtgtgcgttcaactcacagagtttaacctttcttttcatagagcagttaggaaacactctgtttgtaaagtctgcaagtggatattcagacctccttgaggccttcgttggaaacgggatttcttcatattctgctagacagaagaattcccaggaacttccttgtgttgtgtacattcaactcacagagttgaacgttcccttagacagagcagatttgaaacactctttttgtgcaattggcaagtggtgatttcagccgctttgaggtcaatggtagaaaagggaatatcttcgtataaaaactagacagaatcaatcccacaaactgcgttgtgatgtgttcgttcaactcacagagtttaacctttttgttcatagagcagttaggaaacactctgtttgtaaagtctgtaagtggatattctgacattttgtggccttggttggaaatgggatttcttcatattctcctagacagaagaattctcagtaacttccttgtgttgtgtgtattcaactcacagagttgaaagatcctttacacagagcagacttgaaacactctttttgtggaatttgaaagtggagatttcagccgctttgaggtcaatggtagaaaaggaaatatcttcgtatagaaactagacagaatgattctcagaaactcctttgtgatgtgtgcgttcaactcacagagtttaacttttcttttcatagagcagttaggaaacactctgtttgtaaagtctgcaagtggatattgagacctctttgaggccttcgttggaaacgggatttcttcatattctgctagacagaagaattcccagtaacttccttgtgttgtgtgtgttcaactcacagagttgaactttcatttacacagagcagatttgaaacactctttttgtggaatttgcaagtggagatttcaagggctttgaggccaaaggcagaaaaggaaatatcttcgtttcaaaactagacagaatcattctcagaaactgctctgtgatgtgtgcgtacaactctcagagtttaacttttcttttcattcagcagtttggaaacactctgcaaagtctgcacgtagatattttgaccacttagaggccttcgttggaaacgggtttttttcatgtaaggctagacagaagaattcccagtaacttccttgtgttgtgtgcattcaactcacagagatgaacgttcccttagacagagcagatttgaaacactctatttgtgtaatttgcaagtgtagatttcaagcgctttaaggtcaatggcagaaaaggaaatatctccgtttcaaaactagacagaatgattctcagaaactcctttgtgatgtgtgtgttcaactcacagagtttaacatttcttttcatagagcagttaggaaacgctctgtttgtaaagtctgcaagtggatattcagacctcgttgagaccttcgttggaaacgggatttcttcatattctgctagacagaagaattctcagtaacttccttgtgttgtgtttattcaactcacagagttgaacgatcctttacacagagcagacttgaaacactctttttgtggaatttgcaagtggagatttcagccgctttgtggtcaatggtagaaaaggaaatatcttcgtataaagactagacagaatgattctcaaaactcctttgtgatgtgtgcgttcaactcacagagtttaacctttcttttcatagagcagttaggaaacactctgtttgtaaagtctgcaagtggatattcagacctctttgaggccttcgttggaaacgggatttcttcatattctgctagacagaagaattcccagtaacttccttgtgttgtgtgtgttcaactcacagagttgaactttcatatacacagagcagatttgaaacactctttttgtggaatttgcaagtggagatttcaagcgctttgaggccaaaggcagaaaaggaaatatcttcgtataaaaactagacagaatcattctcagaaactgctctgcgatgtgtgcgttcaactctcagagtttaacttttcttttcattcagcagtttgaaaacactctgtttgtaaagtctgcacgtggatattttgaccacttagaggccttcgttggaaacgggtttttttgcctgtaaggctagacagaagaattcccagtaacttccttgtgttgtgtgcattcaactcacagagttgaacgttcccttagacagagcagatttgaaacactctatttgtgcaatttgcaagtgtagatttcaagcgctttaaggtcaacggcagaaaaggaaatatcttcgtttcaaaactagacagaatgattctcagaaactcctttgtgatgtgtgcgttcaactcacagagtttaacctttctgttcatagagcagttaggaaacactctgtttgtaaagtctgtaagtggatattctgacatcttgtggccttcgttggaaacgggatttcttcatattctgctagacagaagaattctcagaatcttccttctgttgtgtgtattcaactcagagagttgaatgatcctttacacagagcacacttgaaacactctttttgtggaatttgcaagtggagatttcagccgctttgaggtccatggtagaaaaggaaatatcttcgtataaaaactagacagaatgattctgagaaactcctttgtgatgtgtgcgttcaactcacagagtttaacctttcttttcatagagcagtttggaaacactccgtttgtaaactctgcaagtggatattcagacctccttgaggccttccttggaaacgggatttcttcatattatgctagacagaagaattcccagtaacttccttgtgttgtgtgtgttgaactcacagagttgaactttcatttagacagagcagatttgaaacactctttttgtggaatttgcaaatggagaattcatgcactttgaggccaaaggcagaaaaggaaatatcttcgtataaaaactagacagaatcattctcagaaactgctctgcgatgtgtgcgtacaaatctcagagtttaacttttcttttcattcagcagtttggaaacactctgtttgtaaagtctgcacgtggataatttgacaacttagagaccttcgttggaaacgggtttttttcatgtaaggctagacagaagaattcccagtaacttccttgtgttgtgtacattcaactcacagagttgaacgttcccttagacagagcagatttgaaacactctttttgtgcaattggcaagtggagatttcaagcgctttgaggtcaatgacagaaaaggaaatatcttcgtttcaaaactagacagaaatcattcccacaaactgcgttgtgatgtgttcgttcatctcacagagtttaacctttcttttcatagagcagttaggaaacagtctgtttgaaaattctgtaagtggatattctgacatcttgtggccttcgttggaaacgggatttcttcatattctgctagacagagcaattctcagtaaacttccttgtgttgtgtgttttcaactcacagagttcaacgatcctttacacagagcagacttgaaacactctttttgtggaatttgcaagtggagatttcagccgctttgaggtcaatggtagaataggaaatatcttcctatagaaactagacagaatgattctcagaaactcctttgtgatgtgtgcgttcaactcacagagtttaacctttcttttcatagagcagttaggaaacactctgattgtaaagtctgcaagtggatattcagaactccttgaggccttcgttggaaacggagatttcttcatattatgctagacagaagaattctcagtaacttccttgtgttgtgtgtattcaactcacagagttgaacgatcctttacagagagcagacttgaaacactctttttgtggaatttgcaagtggagacttcagccgctttgaggtcaatggtagaaaaggaaactatctacgtataaagactagacagaatcattctcagaaactgctctgcgatgtgtgtgttcaactcacagagtttcacctttcttttcatagagcagataggaaacactctgtttgtaaagtctgcaagtcgatattcagacctctttgaggccttcgttggaaacgggtttttttcatataaggctagacagaagaattcccagtaacttccttgtgttgtgtgcattcaactcacagagttgaacgttcccttagacagagcagatttgaaacactctatttgtgcaatttgcaagtgtagatttcaagcgctttaaggtcaatggcagaaaaggaaatttcttcgttttaaaactagacagaatcattcccagaaactgcgttgtgatgtgttcgttcaactcacagagtttaacctttctgttcatagagcagttaggaaacactctgtttgtaaagtctgtaagtggatattctgacgtcttgtggccttcgttggaaacgggatttcttcatattctgctagacagaagaattctcagaaacttcgttgtgttgtgtgttttcaactcacagagttgaacgatcctttacacagagcagacttgaaacactctttttgtggaatttgcaagtggagatttcagccgctttgaggtcaatggtagaaaaggaaatatcttcgtataaaaactagacagaatgattctcagaaacttcattgtgatgtgtgcgttcaactcacagagtttaacctttcttttcatagagcagttaggaaacactctgtttgtaaactctgcaagtggatattcagacctctttgaggccttcgttggaaacgggatttctccatactgtgctagacagaagaattctcagtaacttccttgtgttgtgtgtattcaactgacagagttgaactttcatttcgagagagagcagatttgaaacactgtttttgtggaatttgcaagtggagatttcaagcgctttggggccaaaggcagaaaaggaaatatcttcgtataaaaactagacagaatcattctcaggaactactgcgtgatgtgtgggttcaactctcagagtttaacttttcttttcattcagcggtttggaaacactctgtttgtaaagtctgcacgtggaaattttgaccacttagaggccttcgttggaaacgggtttttttcatgtaaggctagacagaagaattcccagtaacttccttgtgttgtgtgcattcaactcacagagttgaacgttcccttagacagagcagatttgaaacactctatttgtgcaatttgcaagtgtagttttcaagctctttaaggtcaacggcagaaaaggaaatatcttcgtttcaaaactagacagaatgattctcataaactcctttgtgatgtgtgcattcaactcacagagtttcacctttcttttcatagagcagttaggaaacactctgtttgtaaagtctgcaagtggatattcagacctccttgaggccttcgttggtaacgggatttcttcatattctgctagacagaagaattctcagtaacttccttgtgttgtctgtattcaactcacagagttgaacgatcctttacacagagcagacttgaaacactctttttgtggaatttgcaagtggagatttcagccgctttgaggtcaatggtagaaaaggaaactatcttcgtataaagactagacagaatgattctcagaaacttctttgtgatgtgtgcgttcaactcacagagtttaacctttcttttcatagagcagttaggaaacactctgtttgtaaactatgcaagtggatattcagacctctttgaggccttcgttggaaacgggatttcttcatactatgctagacagaagaattcccagtaacttccttgtgttgtgtgtgttcaactcacagaggtgaacggtcctttacacagagcagatttgagacactctttttgtggaatttgctaatggagatttcaagcgctttgaggccaaaggcagaaaaggaaatatcttcgtataaaaactagacagaatcattctcagaaactgctgcgtgatgtgggcgttcaactctcagagtttaacttttcttttcattcagcggtttggaaacactctgtttgtaaagtctgcacgtggatattttgaccacttagaggccttcgttggaaacgggtttttttcatgtaaggctagacagaagaattcccagtaacttccttgtgttgtgtgcattcaactcacagagttgaacgttcccttagacagagcagatttgaaacactctatttgtgcaatttgcaagtgtagatttcaagcgctttaaggtcaacggcagaaaaggaaatatcttcgtttcaaaactagacagaatcattcctacaaactgcgttgtgatgtgttcgttcaactcacagagtttaacctttctgttcatagagcagttaggaaacactctgtttgtaaagtctgcaagtggatattcagacctccttgaggccttcgttggaaacgggatttcttcatattctgctagacagaagaattctcagtaacttccttgtgttgtgtgtattcaactcacagagttgaacgatcctttacacagaacagacttgaaacactctttttgtggaatttgcaagcgcagatttcagccgctttgaggtcaatggtagaacaggaaatatcttcctatagaaactagacagaatgattctcataaactcctttgtgatgtgtgcattcaactcacagagtttcacctttcttttcatagagcagttaggaaacactctgtttgtaaagtctgcaagtggatattcagacctccttgaggccttcgttggaaacgggatttcttcatattctgctagacagaagaattctcagtaacttccttgtgttgtgtgtattcaactcacagagttgaacgatcctttacaaagagcagacttgaaaaactctttttgtggaatttgcaagtggagatttcagccgctttgaggtcaatggtagaaaaggaaactatcttcgtataaagactagacagaatcattctcagaaactgctctgcgatgtgttcgttcaactctcagagtttaacttttcttttcattcagcagtttggaaacactctgtttgtaaagtctgcacgtggatattttgaccacttagaggccttcgttggaaacgggtttttttcctgtaaggctagacagaagaattcccagcaacttccttgtgttgtgtgcattcaactcacagagttgaacgttcccttagacagagcagatttgaaacactctatttgtgcaatttgcaagtgtagatttcaagcgctttaaggtcaatggcagaaaaggaaatatcgtcgtttcaaaactagacagataatcattcccacaaactgcgttgtgatgtgttcgttcaactcacagggtttaacctttctgttcatagagcagttaggaaacactctgtttgtaaagtctgtaagtggatattctgacatcttgtggccttcgttggaaacgggatttcttcatattctgctagacagaagaattctcagtaacttccttgtgttgtgtgtattcaactcaccagagttgaatgatcctttacacagaacagtcttgaaacactctttttgtggaatttgcaagtggagatttcagccgctttgaggtcaatggtagaataggaaatatcttcctatagaaactagacagaatgattctcagaaactcctttgtgatgtgtgcgttcaactcacagagtttaacctttcttttcatagcgcagttgggaaacactctgtttgtaaagtctgcaagtggatattcagacatccttgaggctttcgttggaaacgggatttcttcatattctgctataaagaagaattctcagtaacttccttgtgttttgtgtattcaactgacagagttgaactttcatttagagagagcagatttgaaacactgtttttgtggaatttgcaagtggagatttcaagcgctttgggaccaaaggcagaaaaggaaatatcttcgtataaaaactagacagaatcattctcagaaactgctgcgtgatgtgtgcgttcaactctcagagtttaacttttcttttcattcagcggtttggaaacactctgtttgtaaagtctgcacgtggatattttgaccacttagaggccttcgttggaaacgggtttttttcatgtaaggctagacagaagaattcccagtaacttccttgtgttgtgtgcattcaactcacagagttgaacgttcccttagacagagcagatttgaaacactctatttgtgcaatttgcaagtgtagatttcaagcgcattaaggtcaatggcagaaaaggaaatatcttcgtttcaaaattagacagaatgattctgagaaactcctttgtgatgtgtgcgttcaactcacagagttcaacctttcttttcatagagcagttgggaaacactctgtttgtaaagtgtgcaagtggatattcagacctccttgaggccttcgttggaaacgggatttcttcatattatgctagacagaagaattctcagtaacttccttgtgttgtgtgaattcaactcacaaagttgaacgatcctttacacagagcagacttgaaacactctttttgtggaatttgcaggtgtagatttcagccgctttttattcaatggtagaataggaaatatcttcctatagaaactagacagaatgattctcagaaactcctttgtgatgtgtgcgttcaactcacagagtttaacctttcttttcatagagcagttaggaaacactctgtttgtaaagtctgcaagaggatattcagacctctttgaggccttcgttggaaacgggtttttttcatataaggctagacagaagaattcccagtaacttccttgtgttgtgtgtgttcaactcacagagttgaactttcatttacacagagcagatttgaaacactctttttgtggaatttgcaagcggagatttcaagcgctttgaggccaaaggcagaaaaggaaatatctccgtttcaaaactagacagaatcattctcagaaactgctctgcgatgtgtgcattcaactctcagagtttaatttttcttttcattcagcagtttggaaacattctctttgtaaagtctgcacgtggatattttgaccacttagaggccttcgttggaaacgggttttattcttgtaaggctagacagaagaattcccagtaacttccttgtgttgtgtacattcaactcacagagttgaacgttcccttagacagagcagatttgaaacactctttttgtgcaattggcaaatggagatttcaagcgctttaaggtcaatggcagaaaaggaaatatcttcgtttcaaaactagacagaatgattctcagaaactcctttgagatgtgtgtgttcaactcacagagtttaacctttcttttcatagagcagttaggaaacactctgtttgtaaactctgcaagtggatattcagacctctttgaggccttcgttggaaaccggatttcttcatactgtgctagacagaagaattctcagaatcttccttgtgttgtgtgtattcaactcacagagttgaacgatcctttacacagagcagacttgaaacactctttttgtggaatttgcaagtggagatttcagccgctttgaggtccacggtagaaaaggaaatatcttcgtataacaactagacagaatgattctcagaaacttctttgtgatgtgtgcgttcaactcacagagtttaacctttcttttcatagagcagttacgaaacactctgtttgtaaactctgcaagtggatattcagacctctttgaggccttcgttggaaacgggatttcttcatactatgctagacagaagaattctcagtaacttccttgtgttgtgtgtattcaactgacagagttgaactttcatttagagagagcagacttgaaacactgtttttgtggaatttgcaagtggagatttcaagcgctttggggccaaaggcagaaaaggaaatatcttcgtataaaaactagacagaatcattctcagaaactgctctgcgatgtgtgcgttcaactctcagagtttaacttttcttttcattcagaagtttggaaacactctgtttgtaaagtctgcacgtggataacttgaccacttagaggccttcgttggaaacgggtttttttcatgtaaggctagacagaagaattctcagtaacttccttgtgttgtgtgtattcaactcacatagttgaacgatcctttacacagaacagacttgtaacactctttttgtggaatttgcaagtggagatttcagccactttgaagtcaaaggtagaaaaggaaataacttcctataaaaactagacagaatgattctcagtaaactcctttgtgatgtgtgcgttcaacacacagagtttaacttttcttttcatagagcagttaggaaacactctgtttgtaaagtctgcaagtggatattcagacctctttgaggccttcgttggaaacgggatttcttcatattctgctagacagaataattctcagtaacttccttttgttgtgtgtattcaactcacagagttgaacgatcctttacagagagcagacttgaaacactctttttgtggaatttgcaagtggagatttcagccgctttgaggtcaatggtagaataggaaatatcttcctatagaaactagacagaatgattctcagaaactcctttgtgatgtgtgcgttcaactcacagagtttaacctttcttttcatagagcagttgggaaacactctgtttgtaaagtctgcaagtggatattcagacatccttgaggctttcgttggaaaagggatttcttcatattctgctagaaagaagaattctcagtaacttccttgtgttgtctgtattcaactcacagagttgaacgatcctttacacagagcagacttgaaacactctttttgtggaatttgcaagtggagatttcagccgctttgaggtcaatggtagaataggaaatatcttgctatagaaactatacagaatcattctcagaaactgctgcgtgatgtgtgcgttcaactctcagagtttaacttttcttttcattcagcggtttggaaacactctgtttgtaaagtctgcacgtggaaattttgaccacttagaggccttcgttggaaacgggtttttttcatgtaaggctagacagaagaattcccagtaacttccttgtgttgtgtgcattcaactcacagagttgaacgttcccttagacagagcagatttgaaacactctatttgtgcaatttgcaagtgtagatttcaagcgctttaaggtcaatggcagaaaaggaaatatcttcgtttcaaaactagacagaatcattcccacaaactgcgttgtgatgtgttcgttcaactcatagagtttaacctttctgttcatagagcagttaggaaacactctgtttgtaaagtctgtaagtggatattctgacatcttgtggccttcgttggaaacgggatttcttcatattctgctagacagaagaattctcagtaacttccttgtgttgtgtgtattcaactcacagagttcaacgatcctttacacagagcagactcgaaacactctttttgtggaatttgcaattggagatttcagccgctttgaggtcaatggtagaaaaggaaatatcttcgtataaaaactagacagaatgattctcagaaactcctttgtgatgtgtgcgttcaactcacagagtttaacctttcttttcatagagcagttaggaaacactctgtttgtaaagtctgcacgtggatatttggacttctttgaggccttcgttggcaacggggttttttcatgtaaggctagacagaagaattctcagtaacttccttgtgttgtgtgtattcaactgacagagctgaactttcatttagagagagcacatttgaaacactgtttttgtggaatttgcaagtggagatttcaagcgctttggggccaaaggcagaaaaggaaatatcttcgtataaaaactagacagaatcattctcagaaactgctctgcgatgtgtgcattcaactctcagagtttaatttttcttttcattcagcagtttggaaacactctctttgtaaagtctgcacgtggatattttgaccacttagaggccttcgttggaaacgggttttattcctgtaaggctagacagaagaattcccagtaacttccttgtgttgtgtacattcaactcacagagttgaacgttcccttagacagagcagatttgaaacactctttttgtgcaattggcaaatggagatttcaagcgctttaaggtcaatggcagaaaaggaaatatcttcgtttcaaaactagacagaatcattcccacaaactgcgttgtgatgtgttcgttcaactcacagagtttaacctttcttttcatagagcagttaggaaacagtctgtttgtcaattctgtaagtggatattctgacatcttgtggccttcgttggaaacgggatttcttcacattctgctagacagaagaattatcagtaacttccttgtgttgtgtgtattcaactcacagagttgaacgatcctttacacagagcagacttgaaacactctttttgtggaatttgcaagtggagatttcagccgctttgaggtcaatagtagaaaaggaaatatcttcgtagaaaaactagacagaatgattctcagaaactcctttgtgatgtgtgcgttcaactcacagagtttaacctttcttttcatagagtagttaggaaacactctgtttgtaaagtctgcaagtggatattcagacatccttgaggctttcgttggaaacgggatttcttcatattctgctagaaagaataattctcagtaacttccttgtgttgtgtgtattcaactcacagagttgaatgatcctttacacagagcagacttgaaacactctttttgtggaatttgcttgtggagatttcagccgctttgaggtcaatggtagaataggaaatatcttcttatagaaactagacagaatcattctcagaaactgctctgcgatgtgtgcgttcaactctcagagtttaacttttcttttcattcagcagtttggaaacactctgtttgtaaagtctgcacgtggataacttgaccacttagaggccttcgttggaaacgggtttttttcatgtaaggctagacagaagaattcccagtaacttccttgtgttgtgtgcattcaactcacagagttgaacgttcccttagacagagcagatttgaaacactctatttgtgcaatttgcaagtgtagatttcaagcgctttaaggtcaatggcagaaaaggaaatgtcttcgtttcaaaactagacagaatcattcccacaaactgcgttgtgatgtgttcgttcaactcacagagtttaacctttctgttcatagagcagttaggaaacactctgtttgtaaagtctgtaagtggatattctgacatcttgtggccttggttggaaacgggatttcttcatattctgctagacagaagaattctcagtaacttccttgtgttgtgtgtattcaactcacagagttgaacgatggtttacacagagcagatttgaaacactctttttgtggaatttgcaagtggagatttcagcctctttgaggtcaatggtagaaaaggaaatatcttcgtataaaaactagacagaatgattctcagaaactcctttgtgatgtgtgcgttcaaatcacagagtttaacttttcttttcatagagcagttaggaaacactctgtttgtaaagtctgcaagtggatattcagacctctttgaggccttcgttggaaacgggattttttcatattatgctagacagaagaattctcagtaactgccttgtgttgtgtttattcaactcacagagttgaacgatcctttacacagagcagacttgaaatactctttttgtggaatttgcaagtggagatttcagccgctttgaggtcaatggtagaataggaaatatcttcctatagaaactagacagaatgattctcagaaactcatttgtgatgtgtgcgttcaactcacggagtttaacctttcttttcatagagcagttaggaaacactctgtttgtaaagtctgcaagtggatattcagacctctttgaggtcttcgttggaaacgggatttcttcatattctgctagacagaagaattcccagtaacttcccttgtgttgtgtacattcaactcacagagttgaacgttcccttagacagagcagatttgaaacactctttttgggcaattggcaagtggagattacaagcgctttaaggtcaatggcagaaaaggaaatatcttcgtttcaaaactagacagaatcattcccacaaactgcgttgtgatgtgttcgttcaactcacagagtttaacctttcggttcatagagcagttaggaaacactctgtttgtaaagtctgtaagtggatattctgacatcttgtggccttcgttggaaacgggatttcttcatattctgctagacagaagaattctcagtaacttccttgtgttgtgtgtattcaactcacagagttgaacgatcctttacacagagcagacttgaaacactctttttgtggaatttgcaagtggagatttcagccgctttgaggtcaatggtagaataggaaatatcttccaatagaaactagacagaatgattctcagaaactcctttgtgatgtgtgcgttcaactcacagagtttaacctttcttttcatagagcagttaggaaacactctgtttgtaaagtctgcaagtggatattcagacctctttgagtccttcgttggaaacgggatttcttcatattctgctagacagaagaattcccagtaacttccttgtgttgtgtgtgttcaactcacagagttgaactttcatttacacagagcagatttgaaacactctttttgtggaatttgcaagtggagatttcaagcgctgtgaggccaaaggcagaaaaggaaatatcttcgtataaaaactagacagaatcattctcagaaactgctctgcgatgtgtgcgttcaactctcagagtttaacttttcttttcattcagcagtttgaaaacactctgtttgtaaagtctgcacgtggataatttgaccacttagaggccttcgttggaaacgggtttttttcatgtaaggctagacagaagaattcccagtaacttccttgtgttgtgtacattcaactcacagagttgaacgttcccttagacagagcagatttgaaatactctttttgtgcaattggcaagtggagatttcaagcgctttaaggtcaatggcagaaaaggaaatatcttcgtttcaaaactagacagaatcattcccacaaactgcgttgtgatgtgttcgttcaactcacagagtttaacctttcttttcatagagcagttaggaaacagtctgtttttcaattctgtaagtggatattctgacatctagtggccttcgttggaaacgggatttcttcatactgtgctagacagaagaattctcagtaacttccttgtgttgtgtgtatttaactcacagagttgaacgatcctttacacagagcagacttgaaacactcttttggtggaatttgcaagtggatatttcagccgctttgaggtcaatggtagaataggaaatatcttcctatagaaactagacagaatgattctcagaaactcctttctgatgtgtgcattcaactcacagagtttaacctttcttttcatagagcagttaggaaacactctgtttgtaaagtctgcaagtggatattcagacctctttgaggccttcgttggaaacgggatttcttcatattctgctagagagaagaattcccagtaacttccttgtgttgtgtgtgttcaactcacagagtttgaactttcatttacacagagcagatttgaaacactctttttgtggaatttgcaagtggagatttcaagcgctttgaggccaaaggcagaaaaggaaatatcttcgtttgaaaactagacagaatcattctcagaaactgctctgcgatgtgtgccttcaactctcagagtttaacttttcttttcattcagcagtttggaaacactctgtttgtaaagtctgcacgtggatattttgaccacttagaggccttcgttggaaatgggtttttttcctgtaaggctagacagaagaattcccagtaacttccttgtgttgtgtgcattcaactcacagagttgaacgttcccttagacagagcagatttgaaacactctatttgtgcaatttgcaagtgtagatttcaagcgctttaaggtcaatggcagaaaaggaaatatcttcgtttcaaaactagacagaatcattcccacaaactgcgttgagatgtgttcgttcaactcacagagtttaacctttccgttcatagagcagttaggaaacacactgtttgtaaagtctgtaagtggatattctgacatcttgtggccttcgttggaaacgggatttcttcatattctgctagacagaataattctcagtaacttccttgtgttgtgtgtattcaactcacagagttgaacgatcctttacagagagcagacttgaaacactctttttgtggaatttgcaagtggagatttcggccgctttgaggtcaatggtagaataggaaatatcttcctatagaaactagacataatgattctcagaaactcctttgtgatgtgtgcgttcaactcacagagtttaacctttcttttcctagagcagttagtaaacactctgtttataaagtctgcaagtggatattcagacccctttgaggccttcgttggaaacgggatttcttcatattatgctagacagaagaattctcagtaacttccttgtgttgtgtgtattcaactgacagagttgaactttcatttagagagagcagatttgaaacactgtttttgtggaatttgcaagaggagatttcaagcgctttggggctaaaggcagaaaaggaaatatcttcgtataaaaactagacagaatcattctcagaaactgctgcgtgatgtgtgcgttcaactctcagagtttaacttttcttttcattcagcagtttggaaacactctgtttgtaaagtctgcacgtggaaattttgaccacttagaggccttcgttggaaacgggtttttttcatgtaaggctagacagaagaattcccagtaacttccttgtgttgtgtgcattcaactcacagagttgaacgttcccttagacagagcagatttggaacactctatttgtgcaatttgcaagtgtagatttcaagcgctttaaggtcaacggcagaaaaggaaatatcttcgtttcaaaactagacagaatcattcccacaaactgcgttgtgatgtgttcgttcaactcacagagtttaacctttctgttcatagagcagttaggaaacactctgtttgtaaagtctgtaagtggatattctgacatcttgtggccttcgttggaaactggatttctccatattctactagacagaataattctacagtaacttccttgtgttgtgtgtattcaactcacagagttgaaggatcctttacagagagcaggcttgaaacactctttttgtcgaatttgcaagtggagatttcagccgctttgaggtcaatggtagaataggaaatatcttcttatagaaactagacagaatgattctcataaactcctttgtgatgtgtgcgttcaactcacagagtttaacctttctgttcatagagcagttaggaaacactctgtttgtaaagtctgcaagtggatattcagacctccttgaggccttcgttggaaacgggatttcttcatattctgctagacagaagaattctcagtaacttccttgtgttgtgtgtattcaactcacagagttgaatgatcctttacacagagcagacttgaaacactctttttgtggaatttgcaagtggagatttcagccgctttgaggacaatggtagaaaagtaaatatcttcgtataaagactagacagaatcattctcagaaactgctgcgtgatgtgtgcgttcaactctcagagtttaacttttcttttcattcagcggtttggaaacactctgtttgtaaagtctgcacgtggatattttgaccacttagaggccttcgttggaaacgggtttttttcatgtaaggctggacagaagaattcccagtaacttccttgtgttgtgtgcattcaactcacagagttgaacgttcccttagacagagcagatttgaaacactctatttgtgcaacttgcaagtgtagatttcaagccctttaaggtcaacggcagaaaaggaaatatcttcgtttcaaaactagacagaatcattcccacaaactgcgttgtgatgtgttcgttcaactcacagagtttaacctttctgttcatagagcagttaggaaacactctctttgtaaagtctgtaagtggatattctgatatcttgtggccttcgttggaaacgggatttcttcatattctgctagacagaagaattctcagtaacttccttgtgttgtgtgtatacatctcacagagttgaacgatcctttacacagagcagacttgaaacactctttttgtggaatttgcaagtggagatttcagccgctttgaggtccatggtagaaaaggaaatatcttcgtataaaaactagacagaatgattctcagaaactcctttgtgatgtgtgcgttcaactcacagagtttaacctttcttttcatagagcagttaggaaacactctgtttgtaaagtctgcaagtgaatattcagacatccttgaggttttcgttggaaacgggatttcttcatattctgctagaaagaagaattctcagtaacttccttgtgttgtgtgtattcaactcacagagttgaatgatcctttacacagaacagtcttgaaacactctttttgtggaaattgcaagtggagatttcagccgctttgaggtcaatggtagaataggaaatatcttcctatagaaactagacagaatcattctcagaaactgctctgcgatgtgtgcgttcaactctctgagtttaactttgcttttcattcagcagtttggaaacactctgtttgtaaagtctgcacgtggataatttgaccacttagaggtcttcgttggaaacgggattttttcatgtaaggctagacagaagaattcccagtaacttccttgtgttgtgtacattcaactcacagagttgaacggttcccttagacagagcagatttgaaacactctttttgtgcaattggcaaatggatatttcaagcgctttaaggtcaatggcagaaaaggaaatatcttcgtttcaaaactggacagaatcattcccacaaactgcgttgtgatgtgttcgttcaactcacagagtttaacctttcttttcatagagcagttaggaaacactctgtttgtaaattctgtaagtggatattctgacatcttgtggccttcgtttgaaacgggatttcttcatattctgctagacagaataattctcagtaacttccttgtgttgtgtttattcaactcacagagttgaatgatcctttacacagagcagacttgaaacactctttttgtggaatttgcaagtggagatttcagccgctttgaggtcaatggtagaaaagtaaatatcttcctataaagactagacagaatgattctcagaaactcctttgtgatgtgtgcgttcaactcacagagtttaacctttctgttcatagagccgttaggaaacactctgtttgtaaagtctgcaagtggatattcagatctctttgaggccttcgttggaaacgggatttcttcatattatgctagacagaagaattcccagtaacttccatgtgttgtgtgtgttcaactcacagagttgaactttcatttacacagagcagatttgaaacactctttttgtggaatttgcaaatggaggtttcaagcgctttgaggccagaggcagaaaaggaaatatcttcgtataaaaactagacagaatcattctcagaaactgctctgcgatgtgtgcgttcaactctcagagtttaacttttcttttcattcagcagtttggaaacactctgtttgtaaagtctgcatgtggataatttgaccacttagaggtctttgttggaaacgggtttttttcatgtaaggctagacagaagaattctcagtaacttccttgtgttgtgtgtattcaactcacagagttgaacgttcctttacacagagcagacttgtaacactctttttgtggaatttgcaagtggagatttcagccgctttgaagtcaaaggtagaaaaggaaatatcttcctataaacactagacagaatcattggcacaaactgcgttgtgatgtgttcgttcaactcacagagtttaacctttcttttcatagagcagttaggaaacagtctgtttgtaaattctgtaagtggatattctgacatcttgtgaccttcgttggaaacgggatttcttcatattctgctagacagaagaattctcagtaacttccttgtgttgtgtgtattcaactcacagaattgaacgatcctttacacagagcagacttgaaacattctttttgtggaatttgcaagtggagatttcagccgctttgaggtcaatcgtagaataggaaatatcttcctatagaaactagacagaatgattctcagaaactcctttgtgatgtgtgcgttcaactcacagagtttaacctttcttttcatagagcagttaggaaacactctgtttgttaagtctgcaagtggatattcagtcctctttgaggccatcgttggaaacgggatttcttcatattatgctagacagaagaattctcagtaacttccttgtgttgtgtgtattcaactcacagagttgaacgatcctttacacagagcagacttgaaacactctttttgtggaatttgcaagtggagatttcagccgctttgaggtcaatggttgaataggaaatatcttccaatagaaactagacagaatgattctcagaaactcctttgtgatgtgtgcgctcaactcacagagtttaacttttcttttcatagagcagttaggaaacactctgtttataaagtctgcaagtggatattcagacctctttgaggccttcgttggaaacgggagttcttcatattctgctagacagaagaattctcagaaactcccttgtgttgtgtgtattcaactgacagagttgaactttcatttagacagagcagatttgaaacactctttatgtggaattggccagtggagatttgaagcgctttgagaccaaaggcagaaaaggaaatatcttcgtttcaaaactagacagaatcattcccacaaactgcgttgtgatgtgttcgttcaacacacagggtttaacctttcttttcatagagcagttaggaaacactctgtttgtaaagtctgtaagtggatattctgacatcatgtggccttcgttggaaacgggatttcttcatattctgctagacagaagaattctcagtaacttccttgtgtagtgtgtattcaactcacagagttgaacgatcctttacacagagcagacttgtaacactctttttgtggaatttgcaagtggagatttcagccactttgaagtcaaaggtagaaaaggaaataacttcctataaaaactagacagaatgattctcagaaactcctttgtgatgtgtgcgttcaactcacagagtttaacctttcttttcatagagcagttaggaaacactctgtttgtaaagtctgcaagtggatattcagacctctttgaggccttcgttggaaacgggtttttttcatataaggctagatagaagaattctcagtaacttccttgtgttgtgtgtattcaactgacagagttgaactttcatttagagagagcagatttgaaacactgtttttgtggaatttgcaagtggagatttcaagcgctttggggccaaaggcagaaaacgaaatgtcttcgtataaaaactagacagaatcattctcagaaaccgctctgtgatgtgtgcgttcaactctcagagtttaacttttcttttcattcagcagtttggaaacactctgtttgtaaagtctgcacgtggatattttgaccacttagaggccttcgttggaaacgggttttttttcatgtaaggctagacagaagaattcccagtaacttccttgtgttgtgtacattcaactcacagagttgaacgttcccttagacagagcagatttgaaacactctttttgtgcaattggcaagtggagatttcaagcgctttgaggtcaatggcagaaaaggaaatatcttcgtttcaaaactagacagaatgattctcataaactcctctgtgatgtgtgcgttgaactcacagagtttaacttttcttttcatagagcagttaggaaacactctgtttgtaaagtctgcaagtggatattcagacgtctttgaggccttcgttggaaacgggatttcttcatattatgctagacagaataattctcagtaacttccttgtgttgtgtgtattcaactcacagagttgaacgatcctttacagagagcagacttgaaacactctttttgtggaatttccaattggagatttcagccgctttgaggtcaatcgtagaataggaaatatcttcctatagaaattagatagaatgattctcagaaactcctttgtgatgtgtgcgttcaactcacagagtttaacctttcttttcatagagcagttaggaaacactctctaaagtctgcaagtggatattcagacctccttgaggtcttcgttggaaacgggatttcttcatattctgctagacagaagaattcccagtaacttccttgtgttgtgtgtgttcaactcacagagttgaactttcatttacacagagcagattggaaacactctttttgtggaatttgcaagtggagatttcaagcgctttgaggccaaaggcagaaaaggaaatatcttcgtataaaaactagtcagaatcattctcagaaactgctctgtgatgtgtgcgttcaactctcagagtttaacttttcttttcattcagcagtttggaaacactctgtttgtaaagtctgcacgtggatattttgaccacttagaggccttcgttggaaacgggttttttttcatgtaaggctagacggtagcattcccagtaacttccttgtgttgtgtgcattcaactcacagagatgaacgttcccttagacagagcagatttgaaacgctctatttgtgcaatttgcaagtgtagatttcaagcactttaaggtcaatggcagaaaaggaaatatcttcgtttcaaaactagacagaatgattctcagaaaatcttttgtgatgtgtgcgttcaactcacagagtttaacttttcttttcatagagcagttaggaaacactctgtttgtaaagtctgcaagtggatattcagacctgtttgaggccttcgttggaaacgggatttcttcatattctgctagacagaagaattctcagtaacttccttgtgttgtgtgtattcaactcacagagttgaaggatcctttacagcgagcaggcttgaaacactctttttgtcgaatttgcaagtggagatttcagccgctttgaggtcaatggtagaataggaaatatcttcttatagaaactagacaaaatgattctcagaaactcctttgtgatgtgtgcgttcaactcacagagtttaacctttcttttcatagagcaggtaggaaacactctgtttgtaaagtctgcaagtggatattcagacctccttgaggccttcgttggaaacgggattccttcatattctgctatacagaaacaattcccagtaacttccttgtgttgtgtgtgttcaactcacagagttgaactttcatttacacagagcagatttgaaacactctttttgtggaatttgcaagtggagatttcaagcgctttgaggccaaaggcagaaaaggaaatatcttcgtataaaaactagacagaatcattctcagaaactgctctgcgatgtgtgcgttcaactctcagagtttaacttttcttttcattcagcagtgtggaaacactctgtttgtaaagtctgcacgtggatattttgaccacttagaggccttcattggaaacgggtttttttcctgtaaggctagacagaagaattctcagtaacttccttgtgttgtgtgtattcaactcacagagttgaacgatcctttacacagagcagacttgtaacactctttttgtggaatttgcaagtggagatttcagccgctttgaagtcaaaggtagaaaaggaaatatctccctataaaaactagacagaatgattctcagaaacttctttgtgatgtgtgcgctcaactcacagagtttaacctttcttttcatagagcagttaggaaacactctgtttgtaaagtctgcaagtggatattcagacctctttgaggccttcgtaggaaacgggatttcttcatattatgctagacagaagaattctcagtaacttccttgtgttgtgtgtattcaactcacagagttgaacgatcctttacacagagcagacttgaaacactctttttctggaatttgcaagtggagatttcagccgctttgaggtcaatggtagaataggaaatatcttcccatagaaactagacagagtgattctcagaaactcctttgtgatgtctgcgttcaactcacagagtttaacctttcttttcgtagagcagttaggaaacactctgtttgtaaagtctgcaagtggatattcagacctccttgaggccttcgttggaaacgggatttcttcatattctgctatacagaagaattctcagaatcttccttgtgttgtttgtattcaactcacagagttgaactttcatttacacagagcagatttgaaacactctttttgtggaatttgcaaatggagatttcaagcgctttgaggccaaaggcagaaaaggaaatatcttcgtataaaaactagacagaatcattctcagaaactgctgcgtgatgtgtgcgttcaactctcagagtttaacttctcttttcattcagcggtttggaaacactctgtttgtaaagtctgcacgtggaaattttgaccacttagaggccttcgttggaaacgggtttttttcatttaaggctagacagaagaattcccagtaacttccttgtgttgtgtgcattcaactcacagacttgaacgttcccttagacagagcagatttgaaacactctatttgtgcaatttgcaagtgtagatttcaagcgctttcaggtcaatggcagaaaaggaaatatcttcgtttcaaaactagacagaatcattcccacaaacagcgttgtgatgtgttcattcaactcacagagtttaacctttcttttcatagagcagttaggaaacagtctgtttgtaaattctgtaagtggatattctgacatcttgtggccttcgttggaaacgggatttcttcatattctgctagacagaagaattctcagtaacttccttgtgttgtgtgaattcaactcacagagttgaacgatcctttacacagagcagacttgaaacactctttttgtggaatttgcaagtggagatttcagccgctttgaggtcaatggtagaaaaggaaactatcttcatataaagactagacagaatgattctcagaaactcctttgtgatgtgtgcgttcaactcacagaatttaacctttcttttcatagagcagttaggaaacactctgtttgtaaagtctgcaagtggatattcagacctctttgaggccttcgttggaaacgggtttttttcatataaggctagacagaatcattctcagaaactgctctgcgatgtgtgcgttcaactctcagagtttaacttttcttttcattcagcagtttggaaacactctgtttgtaaagtctgcacgtggataatttgaccacttagaggccttcgttggaaacgggttgttttcatgtaaggctagacagaagaattcccagtaacttaccttgtgttgtgtacattcaactcacagagttgaacgttcccttagacagagcagatttgaaacactttttttgtgcaattggcaaatggagatttcaagcgctttaaggtcaatggcagaaaaggaaatatcttcgtttcaaaactagacagaatcattcccacaaactgcgttgtgatgtgttcgttcaactcacagagtttaacctttctgttcatagagcagttaggaaacactctgtttgtaaagtctgcaagtggatattctgacatcttgtggccttcgttggaaacgggatttcttcatcttctgctagacagaagaattctcagtaacttccttgtgttgtgtgtattcaactcacagagttgaacgatcctttacacagagcgcacttgaaacactcgttttgtggaatttgcaagtggagatttcagccgtgttgaggtaaatggtagaaaaggaaatatcttcgtataaaaactagacagaatgattctcagaaactcctttgtgatgtgtgcgttcaactcacagagtttaacctttcttttcatagagcagttaggaaacactctgtttgtaaagtctgcaagtggatattcagacctccttgaggccttcgttggaaacgggatttcttcatattctgctatacagaagaattctcagaaacttccttgtgttgtgtgtattcaactcacagagttgaacgatcgtttacacacagcagacttgagacactctttttgtggaaattgtaagtggagatttcagccgctttgaggtcaatggtagaaaaggaaatatcttcatataaaaactagacagaatcattctcagaaactgctgtgtgatgtgtgcgttcaactctcagagtttaacttttcttttcattcagcggtttggaaacactctgtttgtaaagtctgcacgtggatattttgaccacttagaggccttcgttggaaacgggtttttttcatgtaaggctagacagaagaattcccagtaacttccttgtgttgtgtgcattcaactcacagagttgaacgttcccttagacagagcagatttgaaacactctatttgtgaatttgcaagtgtagatttcaagcgctttaaggtcaaaggcagaaaaggaaatatcttcgtttcaaaactagacagaattattcccacaaactgcgttgtgatgtgttcgttcaactcacagagtttaacctttctgttcatagagcagttaggaaacactctgtttgtaaagtctataagtggatattctgacatcttgtggccttcgttggaaacgcgatttcttcatattctgttagacagaagaattctcagaatcttccttgtgttgtgtgtattcaactcacacagttgaacgatggtttacacagagcagatttgaaacactatttttgtggaatttgcaagtggagatttcagccgctttgaggtcaatggtagaaaaggaaatatcttcgtataaaaactagagagaatgattctcagaaactcctttgtgatgtgtgtgttcaactcacagagtttaacctttcttttcatagagcagttagtaaacactctgtttataaagtctgcaagtggatattcagacccctttgaggccttcgttggaaatgggattgcttcatattatgctagacagaagaattctcagtaacttccttgtgttgtgtgtattcaactgacagagttgaactttcatttggagagagcagatttgaaacactgtttttgtggaatttgcaagtggaaatttcaagcgctttggggtcaaaggcagaaaaggaaatatcttcgtataaaaactagacagaatcattctcagaaactgctgcgtgatgtgtgcgttcaactctcagagtttaacttttcttttcattcagcggtttggaaacactctgtttgtaaagtctgcacgtggatattttgaccacttagaggccttcgttggaaacgggttttttttcatgtaaggctagacagaagaattcccagtaacttccttgtgttgtgtgcattcaactcacagagttgaacgttcccttagacagagcagatttgaaacactctagttgtgcaatttgcaagtgtagatttcaagcgctttaaggtcaatggcagaaaaggaaatatcttcgtttcaaaactagacagaatcattcccacaaactgcgttgtgatgtgttcgttcaactcacagagtttaacctttccgttcatagagcagttaggaaacactctgtttgtaaagtctgtaagtggatattctgacatcttgtggccttcgttggaaacgggatttcttcatattctgctagacagaagaattctcagtaacttccttgtgttgtgtgtattcagctcacagagttgaacgatcctttacaccgagcagacttgaaacactctttttgtggaatttgcaagtggtgatttcagccgctttgaggtcaatggtagaaaaggaaactattttcgtataaagactagacagaatgattctcagaaactcctttgtgatgtgtgcgttcaactcacagaagtttaacctttcttttcatagagcagttatgaaacactctgtttgtaaagtctgcaagtggatattcagacctctttgaggccttcgttggaaacgggtttttttcatataaggctagacagaagaattctcagtaacttccttgtgttgtgtgtattcaactgacagagttgaactttcatttagagagagcagatttgaaacactgtttttgtggaatttgcaagtggagatttcaagcgatttggggccaaaggcagaaaaggaaatatcttcgtataaaaactagacagaatcattctcagaaactgctgcgtgatgtgtgcgttcaactctcagagtttaacttttcttttcattcagcggtttggaaacactctgtttgtaaagactgcacgtggatattttgaccacttagaggccttcgttggaaacgggattttttcatgtaaggctagacagaagaattcccagtaacttccttgtgttgtgtgcattcaactcacagagttgaacgttcccttagacagagcagatttgaaacactctatttgtccaatttgcaagtgtagatttcaagcgctttaaggtcaacggcagaaaaggaaatatcttcgtttcaaaactagacagaatcattcccacaaactgcgttgtgatgtgttcgttcaacccacagagtttaacctttctgttcatagagcagttaggaaacacactgtttgtaaagtatgaaagtggatattctgacatcttgtggccttcgttggaaacgggatttcttcatattctgctagacagaagaattctcagtaacttccttgtgttgtgtgtattcaactcacagaattgaacgatcctttacacagagcagacttgaaacactctttttgtggaatttgcaagtggagatttcagccgctttgaggtcaatggtagaaaaggaaatatcttcgtatagaaacaagacagaatgattctcagaaacttcattgtgatgtgtgcgttcaactcacagagtttaacctttcttttcatagagcagttaggaaacactctgtttgtaaactctgcaagtcgatattcacacctctttgaggccttcgttggaaacgggatttcttcatactgtgctagacagaagaattcccagtaacttccttgtgttgtgtgtgttcaactcacagagttgaactttcatttacccagagcagatttgaaacactttttttgtggaatttgcaagtggagatttcaagcgctttgaggccaaaggcagaaaaggaaatatcttcgtttcaaaactagacagaatcattctcagaaactgctgcgtgatgtgtgcgttcaactctcagagattaacttttcttttcattcagcggtttggaaacactctgtttgtaaagtctgcacgtggatattttgaccacttagaggccttcgttggaaacgggtttttttcatgtaaggctagacagaagaattcccagtaacttccttgtgttgtgtgcattcaactcacagagctgaacgttcccttagacagagcagatttgaaacactctatttgtgcaatttgcaagtgtagatttcaagcgctttaaggtcaacggcagaaaaggaaatatcttcgtttcaaaaccagacagaatcattcccacaaactgcgttgtgatgtgtgcgttcaactcacagagttcaacttttcttttcatagagcagttaggaaacactctgtttgtaaagtctgcaagtggatattcagacctatttgaggccttcgttggaaacgggatttcttcatattctgctagacagaataattctcagtaacttccttgtgttgtgtgtattcaactcacagagttgaatgatcctttacagagagcagacttgaaacattctttttgtggaatttgcaagtggagatttcagccgctttgaggtcaatggtagaaaaggaaatatcttcgtataaagactagacagaatgattctcagaaactcctttgtgatgtgtgcgttcaactcacagagtttaacttttcttttcatagagcagttaggaaacactctgtttgtaaagtctgcaagtggatattcagacctctttgaggccttcgttggaaatgggatttcttcgtattctgctagacagaagaattctcagtaacttccttgtgttgtgtgtattcaactgacagagttgaactttcatttagagagagcagatttgaaacactgtttttgtggaatttgcaagtggagatttcaagcgcttttgggccaaaggccgaaaaggaaatatcttcgtataaaaactagacagaatcattctcagaaactgtggcgtgatgtgtgcgttcaactctcagagtttaacttttcttttcattcagcggtttggaaacactctatttgtaaagtctgcccgtggatattttgaccacttagaggccttcgttggaaacgggtttttttcatgtaaggctagacagaagaattcccagtaacttccttgtgttgtgtgcattcaacttgcagagttgaacgttcccttagacagagcagatttgaaacactctatttgtgcaatttgcaagtgtagatttcaagcgctttaaggtcaatggcagaaaaggaaatatcttcgtttcaaaactagacagaaatcattcccacaaactgcgttgtgatgtgttcgttcaactcacaggagtttaacctttcttttcatagagcagttaggaaacagtctgtttgtcaattctgtaagtggatattctgacatcttgtggccttcgttggaaacgggatttcttcatatttggctagacagaaataattctcagtaacttccttgtgttgtgtgtattcaactcacagagttgaaggatcctttacagagagcaggcttgaaacactctttttgtcgaatttgcaagtggagatttcagccgctttgaggtcaatggtagaataggaaatatcttcttatagaaactagacagaatgattctcagaaactcctttgagatgtgtgtgttcaactcacagtttaacctttcttttcatagagcagttaggaatcactctgtttgtaaagtctgcaagtggatattcagacctctttgaggccttcgttggaaacgggtttttttcatataaggctagacagaagaattctcagtaacttccttgtgttgtgtgtattcaactgacagggttgaactttcatttagagagagcagatttgaaacactgtttttgtggaatttgcaagtggagatttcaagcgctttggggccaaaggcagaaaaggaaatatcttcgtataaaaactagacagaatcattctcagaaactgctgcgtgatgtgtgcgttcaactctcagagtttaacttttcttttcattcagcggtttggaaacactctgtttgtaaagtctgcacgtggaaattttgaccacttagaggccttcgttggaaacgggtttttttcatgtaaggctagacagaagaattcccagtaacttccttgtgttgtgtgcattcaactcacagagttgaacgttcccttagacagagcagatttgaaacactctatttgtgcaatttgcaagtgtagatttcaagcgctttaaggtcaatgacagaaaaggaaatatcttcgtttcaaaactagacagaatcattcccacaaactgcgttgtgatgtgttcgttcaactcacagagttttacctttctgttcatagagcagttaggaaacactctgtttgtaaagtctgcaagtggatattcagacctccttgagaccttcgttggaaacgggatttcttcatattctgctagacagaagaattctcagtaacttccttgtgttgtgagtattcaactcacagagttgaacgatcctttacacagagcagacttgaaacactctttttgtggaatttgcaagaggagatttcagccgctttgaggtcaatggtagaaaaggaaatatcttcgtataaagactagacagaatgattctcagaaactcctttgtgatgtgtgcgttcaactcacagagttcaacctttcttttcatagagcagttgggaaacactctgtttgtaatgtctgcaagtggatattcagacttccttgaggccttcgttggaagcgggatttcttcaaattctgctagacagaataattctcagtaacttccttgtgttgtgtgtattcaactcacagatttgaacgatcctttacacagagcagacttgaaacattctttttgtggaatttgcaagtggagatttcagccgctttgaggtcaatggtagaataggaaatatcttcctatagaaactagacagaatcattctcggaaactgctctgtgatgtgtgcgttcaagtctcagagtttaacttttcttttcattcagcagtttggaaacactctgtttgtaaagtctgcacgtggatattttgaccacttaaaggccttcgttggaaacgtgtttttttcctgtaaggctagacagaagaattcccagtaacttccttgtgttgtgtacattcaactcacagagttgaacgttcccttagacagagcagatttgaaacactctttttgtgcaattggcaagtggtgatttcagccgctttgtggtcaatggtataaaaggaaatatcttcgtataaaaactagacagaatcattctcagaaactgctctgcgatgtgtgcgttcaactctcagagtttaacttttcttttcattcagcagtttggaaacactctgtttctaaagtctgcacgtggataacttgaccacttagaggccttctttggaaacgggtttttttcctgtaaggctagacagaagaattcccagtaacttccttgtgttgtgtacattcaactcacagagttgaaccgttcccttagacagagcagatttgaaacactctttttgtgcaattggcaagtgctgatttcagccgctttgaagtcaatggtagaaaaggaaatatcttcgtataaaaactagacagaatgattctcagaaacttcattgtgatgtgtgccgttcaactcacagagtttaacctttcttttcatagagcagttaggaaacactctgtttgtaaactctgcaagtggatattcagacctctttgaggccttcgttggaaacgggatttcttcatactgtgctagacagaagaattctcagtaacttcattgtgttgtgtgtattcaactcacagatttcaacgatcctttacacagagcagacttgaaatactctttttatggaatttgcaagtggagatttcagccgctttgaggtcaatgtagaataggaaatatcttcctatagaaattagacagaatcattctcagaaactgctgcgtgatgtgtgcgttcaactctcagagtttaacttttcttttcattcagcggtttggaaacactctgtttgtaaagtctgcacgtggatattttgaccacttagaagccttcgttggaaacgggtttttttcatgtaaggctagacagaagaattcccagtaacttccttgggttgtgtacattcaactcacagagttgaacgttcccttagacagagcagatttgaaacactctttttgtgcaattggcaagtggagatttcaagcgctttaaggtcaatggcagaaaaggaaatatcttcgtttcaaaactagacagaatcattcccacaaactgtgttgtgatgtgttcgttcaactcacagagtttaacctttcttttcatagagcagttaggaaacactctgttggtaaattctgtaagtggatattctgacatcttgtggccttcgttggaaacgggatttcttcatattctgctacacagaagaattctcagtaacttccttgtgttgtgtgtattcaactcacagagttgaacgatcctttacacagagcagacttgaaacactctttttgtggaatttgcaagtggagatttcagccgttttgaggtcaatggtagaaaaggaaatatcttcgtataaagactagacagaatgattctaagaaaatcttttgtgatgtgtgcgttcaactcacagagtttaacttttcttctcatagagcagttaggaaacactctgtttgtaaagtgtgcaagtggatattcagacctctttgaggccttcgttggaaacgggatttcttcatattatgctagacagaagaattcccagtaacttccttgtgttgtgtgtgttcaactcacagagttgaactttcatttacacagagcagatttgaaacactctttttgtggaatttgcaaatggagatttcaagcgctttgaggccaaaggcagaaaaggaaatatcttcgtttcaaaactagacagaatcattctcagaaactgctctgcgatgtgttcgttcaactctcagagtttaacttttcttttcattcagcagtttggaaacactctgtttgtaaagtctgcacgtgcataatttgaccacttagaggccttcgttggaaacgggttttttttcatgtaaggctagacagaagaattcccagtaacttccttgcgttgtgtacattcaactcacagagttgaacgttcccttagacagagcagatttgaaacactctttttgtgcaattggcaagtggagatttcaagcgctttaaggtcaatggcagaaaaggaaatatcttcgtttcaaaactagacagaatcattcccaaaaactgcgttgtgatgtgttcgttcatctcacagagtttaacctttcttttcatagagcagttaggaaacagtctgtttgtaaattctgtaagtggatattctgacatcttgtggccttcgttggaaacgggatttcttcatattctgctagacagaagaattctcagtaacttccttgtgttgtgtgtattcaactcatagaggtgaacgatcctttacacagaacagacttgaaacactctttttgtggaatttgcaagtggagatttcagccgctttgagttcaatggttgaataggaaatatcttcctatagaaactagacagaatgattctcagaatctcctttgtgatgtgtgcgttcaactcacagagtttaacctttcttttcatagagcatttaggaaacactctgtttgtaaagtctgcaagtggatattcagacctccttgaggccttcgttggaaacgggatttcttcatattatgctagacagaagaattctcagtaacttccttttgttgtgtgtattcaactgacagagttgaaccttcccttagacagagcagatttgaaacactctttttgtggagtttgcaagtggagatttaaagcgctttgaggccaaaggcagaaaaggaaatatcttcgtataaaaactagacagaatcattctcagaaactgctgcgtgatgtgtgcgttcaactctcagagtttaacttttcttttcattcagcggtttggaaacactctgtgtgtaaagtctgcacgtggatattttgaccacttagaggccttcgttggaaacgggtttttttcatgtaaggctagacagaagaattcccagtaacttccttgtgttgtgtgcattcaactcacagagttgaacgttcccttagacagagcagatttgaaacactctatttgtgcaatttgcaagtgtagatttcaagcgctttaaggtcaacggcagaaaaggaaatatcttcgtttcaaaactagacagaatgattctcagaaactcctttgtgatgtgtgcgttcaactcacagagtttaacctttcttttcgtagagcaggtaggaaacactctgtttgtaaagtctgcaagtggatattcagacctctttgaggccttcgttggaaatgggatttcttcatattctgctagacagaataattctcagtaacttccttgtgttgtgtgtattcaactcacagatttgaacgatcctttacagagagcagacttgaaacactctttttgtcgaatttgcaagtggagatttcagccgctttgaggtcaatagtagaaaaggaaatatcttcgtagaaaaactagacagaatgattctcagaaactgctttgtgatgtgtgcgttcaactcacagagtttaacctttcttttcatagagcagttgggaaacactctgttggtaaagtctgcatgtggatattcagacatccttgaggctttcgttggaaacgggatttcttcatattctgctagaaagaagaattctcagtaacttccttgtgttgtgtgtgttcaactcacagagttgaactttcatttacacagagcagattggaaacactctttttgtggaatttgcaagtggagatttcaagcgctttgaggccaaaggcagaaaaggaaatatcttcgtataaaaactagacagagtcattctcagaaactgctctgtgatgtgtgcgttcaactgtcatagtttaacttttcttttcattcagcagtttggaaacactctgtttgtaaagtttgcacgtggacattgtgaccacttagaggcctttgttggaaacgggtttttttcatgaaaggctagacagaagaattcccagtaacttccttgtgttctgtgcactcaactcacagagatgaacgttcccttagacagagcagatttgaaacactctatttgtgcaatttgcaagtgtagatttcaagcgctttaaggtcaatggcagaaaaggaaatattttcgtttcaaaactagacagaatgattctcacaaactcctttgtgatgtgtgcgttcaactcacagagtttaacctttcttttcatagagcagttaggaaacactctgtttgtaaagtctgcaagtggatattcagacctctttgaggccttcgttggaaacgggatttcttcatattctgctagacagaagaattctcagtaacttccttgtgttgtgtttattcaactcacagagttgaatgatcctttacacagagcagacttgaaacactctttttgtggaatttgcaagtggagatttcagccgctttgaggtcaatggtagaaaaggaaatatcttcgtataaagactagacagaatgattctcagaaactcctttgtgatgtgtgcgttcaactcacagagtttaacctttcttttcatagagcagttaaaaacactctgtttgtaaagtctgcaagtggatattcagacctctttgaggccttcattggaaacgggtttttttcatataaggctagacagaagaattcccagtaacttccttgtgttgtgtgtgttcaactcacagagttgaactttcatttacacagagcagatttgaaacactctttttgtggaatttgcaaatggagatttcaagcgctttgaggccaaaggcagaaaaggaaatgtcttcgtttcaaaactagacagaatcattctcagaaactgctctgcgatgtgtgcgttcaactctcagagtttaacttttcttttcattcagcagtttggaaacactctgtttgtaaagtctgcacgtggataacttgaccagttagaggccttcgttggaaacgggtttttttcctgtaaggctagacagaagaattcccagtaacttccttgtgttgtgtgcattcaactcacagagttgaacgttcccttagacagagcagatttgaaacactctatttgtgcaatttgcaagtgtagttttcaagctctttaaggtcaacggcagaaaaggaaatatcttcgtttcaaaactagacagaatcattcccacaaactgcgttgtgatgtgttcgttcaactaacagagtttaacctttcttttcatagagcagttaggaaacagtctgtttgtcaattctgtaagtggatattctgacatcttgtggccttcgttggaaacgggatttcttcatattctactagacagaagaattcccagtaacttccttgtgttgtgtgtgttcaactcacagagttgaactttcatttacacagagcagatttgaaacactctttttgtggaatttgcaaatggagatttcagccgcgttgaggccaatggtagaaaaggaaatatcttcgtttcaaaactagacagaatgattctcagaaactcctttgtgatgtgtgcgttcaactcacacagtttaacctttcttttcatagagcagttaggaaacactctgtttgtaaagtctgcaagtggatattcagacctccttgaggccttcgttggaaacgggatttcttcatattctgctagaaagaaaaattctcagaatcttccttgtgttgtgtgtattcaactcacagagttgaacgatcctttacacagagcagatttgaaacactctttttgtggaatttgcaagtggagatttcaagcgctttgaggctaaaggcagaaaaggaaatatcttcgtataacaactagacagaatcattctcagaaactgctctgcgatgtgtgcgttcaactctcagagtttaacttttcttttcattcagcagtttggaaacactctgtttgtaaagtctgcacgtggatattttgaccatttagaggccttcgttggaaacgggtttttttcttgtaaggctagacagaagaattcccaggaacttccttgtgttgtgtacattcaactcacagagttgaacgttcccttagacagagcagatttgaaacactctttttgtgcaattggcaagtggtgatttcagcagctttgaggtcaatggtagaaaaagaaatatcttcgtataaaaactagacagaatcattcccacaaactgcgttgtgaggtgttcgttcaactcacagagtttaacctttcttttcatagagcagttaggaaacagtctgtttgtaaattctgtaagtggatattctgacatcttgtggccttcgttggaaacgggatttcttcatattctgctagacagaagaattctcagaaactttccttgtgttgtgtgtattcaactcacagagttgaacgatcgtttacacagagcagacttgagacactctttttgtggaatttgtaagtggagatttcagccgctttgaggtcaatggtagaaaaggaaatatcttcatatataaaccagacagaatgattctcagaaactcctttgtgatgtgtgtgttcaactcacagagtttaacctttcttttcatagaacagttagtaaacactctgtttttaaagtctgcaagtggatattcagacccctttgaggccttcgttggaaacgggatttcttcatattctgctagacagaagaattcccagtaacttccttgtgttgtgtgtgttcaactcacagagttgaactttcatttacacagagcagatttgaaacactctttttgtggaatttgcaaatggagatttcaagcgcttggaggccaaaggcagaaaaggaaatatcttcgtataaaaactagacagaatcattctcagaaactgctctgcgatgtgtgcgttcaactctcagagtttaacttttcttttcattcagcagtttggaaacactctgtttgtaaagtctgcacgtggataatttgaccacttacaggccttcgttggaaacgggtttttttcatgtaaggctagacagaagaattcccagtaacttccttgtgttgtgtacattcaactcacagagttgaacgttcccttaaacagagcagatttgaaacactctttttgtgcaattggcaagtggagatttcaagcgctttgaggtcaatggcagaaaaggaaatatcttcgtttcaaaactagacagaatgattctcagaaactcctttgtgatgtgtgcgttcaactcacagagtttaacctttcttttcatagagcagttaggaaacactctgtttgtaaagtcggcaagtggatattcagtcctcattgaggccttcgttggaaacgggatttcttcatattctgctagacagaagaattctcagtaacttccttgtgttgtgtgtattcaactcacagagttgaacgatcctttacacagagcagacttgaaacacactttttgtggattttgcaagtggagatttcagcctctttgagatcaatggtagaataggaaatatcttcctatagaaactagacagaatgattgtcagaaactcctttgtgatgtgtgcgttcaactcacagagtttaaccattcctttcatagagcagttaggaaacactctgtttgtaaagtctgcaagtggatattcagacatctttgaggccttcgttggaaacgggatttcttcatattctgctagacagaagaattctcagtaacttccttgtgttgtgtgtattcaactgacagagttgaactttcatttagagagagcagatttgaaacactgtttttgtggaatttgcaagtggtgacttcaagcgctttggggccaaacgcagaaaaggaaatatcttcgtataaaaactagacagaatcattctcagaaactgctctgcgatgtgtgcgttcaagtctcagagtttaacttttcttttcattcagcagtttggaaacactctgtttgtaaagtctgcacgtggatattttgaccacttagaggccttcgttggaaacgggtttttttcctgtaaggctagacagaagaattcgcagtaacttccttgtgttgtgtacattcaactcacagagttgaacgttcccttagacagagcagatttgaaacactctttttgtgcaattggcaagtggagatttcaagcgctttaaggtcaatggcagaaaaggaaatatcttcgtttcaaaactagacagaatgattcccagaaaatcctttgtgatgtgtgcgttcaactcacagagtttaacttttcttttcatagaacagttaggaaacactctgtttgtaaagtctgcaagtggatattcagacctctttgaggccttcgttggaaacgggatttcttcatattatgctataaagaagaattctcagtaactttccttgtgttgtgtgtattcaactcacagagttgaacgatcctttacagagagcagacttgaaacactctttttgtggaatttgcaagtggagatttcagccgctttgaggtcaatggtagaataggaaatatcttccaatagaaactagacagaatgattctcagaaacttctttgtgatgtgtgcgttcaactcacacagtttaacctttcttttcatagagcagttaggaaacactctgtttgtaaagtctgcaagtggatattcacacctccttgaggccttcgttggaaacgggatttcttcatattatgctagacagaagaattcccagtaacttccttgtgttgtgtgtgttcaactcacagagttgaactttcatttacacagagcagatttgaaacactctttttgtggaatttcaagtggagatttcaagcgctttgaggccaaaggcagaaaaggaaatatcttcgtataaaaactagacagaatgattctcagaaactcctttgtgatgtgtgcgttcaactcacagagtttaacctttcttttcattcaccagtttggaaacactctgtttgtaaagtctgcacgtggatattttgaccacttagaggccttcgttggaaacgggtttttttcctgtaaggctagacagaagaattcccagtaacttccttgtgttgtgtgcaatcaaatcacagagttgaacgttcccttagacagagtagatttgaaacactctatttgtgcaatttgcaagtgtagatttcaagcgctttaaggtcaaaggcagaaaaggaaatatcttcgtttcaaaactagacagaatcattcccacaaactgcgttgtgatgtgttcgttcaactcacagcagtttaacctttcttttcatagagcagttaggaaacagtctgtttgtaaattctgtaagtggatattctgacatcttgtggccttcgttggaaaagggatttcttcatattctgctagacagaataattctcagtaacttccttgtgttgtgtgcattcaactcacagagttgaacgatcctttacagagagcagacttgaaacactctttttgtggaatttgcaagtggagatttcagccgctttgaggtcaatggtagaataggaaatatcttcctacagaaactagacagaatgattctcataaactcctttgtgatgtgtgcgttcaactcacagagtttaacctttcttttcatagagcagttaggaaacactctgtttgtaaagtctgcaagtggatattcagacctctttgaggccttcgttggaaacgggatttcttcatattctgctagacagaagaattctcagtaacttccttgtgttgtgtgtattcaactcacagagttgaacgatcctttacacagagcatacttgaaacactctttttgtggaatttgcaagtggagatttcagccgctttgaggtcaattgtagaaaaggaaatatcttcgtagaaaaactagacagaatcattctcagaaagtgctctgcgatgtgtgcgttcaactctcagagtttaactttgcttttcattcagcagtttggaaacactctgtttgtaaagtctgcacgtggataatttgaccacttagaggccttcgttggaaacgggtttttttcatgtaaggctagacagaagaattcccagtaacttccttgtgttgtgtgcattcaactcacagagttgaacgttccctagacggagcagatttgaaacactctatttgtgcaatttgcaagtgtagatttcaagcgctttaaggtcaatggcagaaaaggaaatatcttcgtttcaaaactagacagaatcattcccacaaactgcgttgtgatgtgttcgttcatctcacagagtttaacctttcttttcgtagagcagttaggaaacagtctgtttgtaaattctgtaagtggatattctgacatcttgtggccttcgttggaaacgggatttcttcatattgctgctagacagaagaattctcagtaacttccttgtgttgtctgtattcaactcacagagttgaacgatcctttacacagagcagacttgaaacacactttttgtggaatttgcaagtggagatttcagccgctttgaggtcaatggtagaataggaaatatcttcctatagaaactagacagaatgattctcagaaactcctttgtgatgtgtacgttcaactcacagagtttaacctttcttttcatagagcagttaggaaacactctgtttgtaaagtctgcaagtggatattccgacatccttgaggctttcgttggaaacgggatttcttcatattctgctagaaagaagaattcccagtaacttccttgtgttgtgtgtgttcaactcacagagttgaactttcatttacacacagcagatttgaaacactctttttgtggaatttgcaaatggagatttcaagcgctttgaggccaaaggcagaaaaggaaatatcttcgtataaaaactagacagaatcattctcagaaactgctctgcgatgtgtgcgttcaactctcagagtttaactttgcttttcattcagcagtttggaaacactctgtttgtaaagtctgcacgtggataatttgaccacttagaggccttcgttggaaacgggtttttttcatgtaaggctagacagaagaattcccagcaacttccttgtgttgtgtgcattcaactcacagagttgaacgttcccttagacagagcagatttgaaacactctatttgtgcaatttgcaagtgtagatttcaagccctttaaggtcaatggcagaaaaggaaatatcttcgtttcaaaactagacagaatcattctcagaaactgctctgcgatgtgtgcgttcaactctccgagtttaacttttcttttcattcagcagtttggaaacactctgtttgtaaagtctgcacgtggataatttgaccacttagaggccttcgttggaaacggttttttttcatgtaaggctagacagaagaattctcagtaacttccttgtgttgtgtgtattcaactcacagagttgaacgatcctttacacagaccagacttgtaacactctttttgtggaatttgcaagtggagatttcagccgctttgaagtcaaaggtagaaaaggaaatatcttcgtataaaaactagacagaatgattctcagaaactcctttgtgatgtgtgtgttcaactcacagagtttaacctttcttttcatagagcagttagtaaacactctgtttgtacagtctgaaagtggatattcagacccctttgaggccttcgttggaaaagggatttcttcatattatgctagacagaagaattcccagtaacttccttgtgttgtgtgtgttcaactcacagagttgaactttcatttacacagagcagatttgaaacactctttttgtggaatttgcaagtggagatttcaagcgctttgaggccaaaggcagaaaaggaaatatcttcgtttgaaaactagacagaaatgattctcagaaactcctttgtgatgtgtgcgttcaactcacagagtttaacctttcttttcatggagctgttaggaaacactctgtttgtaaagtctgcaagtggatattcagacctctttgaggccttcgttggaaacgggtttttttcatataaggctagacagaagaattcccagtaacttccttgtgttgtgtacattcaactcacagagttgaacgttcccttagacagagcagatttgaaatactctttttgtgcaattggcaagtggagatttcaagcgctttaaggtcaatggcagaaaaggaaatatcttcgtttcaaaactagacagaatcattcccacaaactgcgttgtgatgtgttcgttcaactcacagagtttaacctttcttttcatagagcagttaggaaacactctgtttgtaaattctgtaagttgatattctgacatcttgtggccttcgttggaaactggatttcttcatattctgctagacagaagaattctcagaatctttccttgtgttgtgtgtattcaactcacagagttgaacgatggtttacacagagcagatttgaaacactctttttgtggaatttgcaagtggagatttcagccgctttgaggtcaatggtagaaaaggaaatatcttcgtataaaaactagacagaatgattctcagaaactcctttgtgatgtgtgcgttcacctcacagagtttaacctttcttttcatagagcagttaggaaacactctgtttgtaaagtctgcaagtggatattcagacctctttgaggccttcgttggaaacgggatttcttcatattatgctagacagaagaattcccagtaacttcccttgtgttgtgtgtattcaactcacagagttgaactttcatttacacagagcagatttgaaacactctttttgtggaatttgcaaatggagatttcaagcgctttgaggccaaaggcagaaaaggaaatatcttcggtataaaaactagacagaatcattctcagaaactgctctgtgatgtgtgcgttcaactctcagagtttaacttttcttttcattcagcagtttggaaacactctgtttgtaaagtctgcacgtggataatttgaccacttagaggccttcattggaaacgggtttttttcatgtaaggctagacagaagaattcccagtaacttccttgtgttgtgtacattcaactcacagagttgaacgttcccttagacagagcagatttgaaacactctttttgtgcaattggcaagtggagatttcaagcgctttaaggtcaatggcagaaaaggaaatatcttcgtttcaaaactagacagaatgattctcagaaactcctttgtgatgtgtgcgttcaactcacagagtttaaactttcttttcatagaggagttaggaaacactctgtttgtaaagtctgcaagcggatattcagacctctttgaagccttcgttggaaacgggatttcttcatattctgctagacagaagaattctcagtaacttccttgtgttgtgtgtattcaactcacagagatgaacgatcctttacacagagcagacttgaaacactccttttgtggaatttgcaagtggagatttcagccgctttgaggtcaatggtagaaaaggaaactatcttcgtataaagactagacagaatgattctcagaaactcctttgtgatgtgtgtgttcaactcacagagtttaacctttcttttcatagagcagttaggaaacactctgtttgtaaagtctgtaagtggatattcagacctctttgaggccttcgttggaaacgggtttttttcatataaggctagacagaagaattcccagtaacttccttgtgttgtgtgtgttcaactcacagagttgaactttcatttacacagagcagatttgaaacactctttttgtggaatttgcaaatggagatttcaagcgctttgaggccaaaggcagaaaaggaaatatcttcgtataaaaacttgacagaatcattctaagaaactgctctgtgatgtgtgtgttcaactctcagagtttaacttttcttttccttcagcagtttggaaacactctgtttgtaaagtctgcacgtggataatttgaccacttagaggccttcgttggaaacgggtttttttcatgtaaggctagacagaagaattcccagtaacttccttgtgttgtgtacattcaactcacagagttgaacgttcccttaaacagagcagatttgaaacactctttttgtgcaattggcaaatggagatttcaagggctttaaggtcaatggcagaaaaggaaatatcttcgtttcaaaactagacagaacgattctcagaaactcctttgtgatgtgtgcgttcaactcacagagtttaacctttcttttcatagagcagttaggaaacactctgtttgtaaagtctgcaagtggatattcagacctctttgaggccttcgttggaaacgggatttcttcattttctgctagacagaagaattctcagtaacttccttgtgttgtgtgtattcaactcacagagttgaacgatcctttacacagagcagacttgaaacactctttttgtggaatttgcaagtggagatttcagccgctttgtggtcaacggtagaaaaggaaatatcttcgtataaagactagacagaatgattctcagaaactcctttgtgatgtgtgtgttcaactcacagagtttaacctttcttttcatagagcagttagtaaacactctgtttataaagtctgcaagtggatattcagacccctttgaggccttcgttggaaacgggatttcttcatcttatgctagacagaagaattctcagtaacttccttgtgttgtgtgtattcaactgacagagttgaactttcatttagacagagcagatttgaaacactctttttgtggaatttgcaagtggagatttcaagcgctttgaggccaaaggcagaaaaggaaatatctttgtataaaaactagatagaatcattctcagaaactgctctgcgatgtgtgcgttcaactctcagagtttaacttttcttttcattcagcagtttggaaacactctgtttataaagtctgcacgtggatattttgaccacttagaggccttcgttggaaacgggtttttttcctgtaaggctagacagaataattcccagtaacttccttgtgttgtgtacattcaactcacagagttgaacgtacccttagacagagcagatttgaaacactctttttgtgcaattggcaagtggagatttcaagcgctttaaggtcaatggcagaaaaggaaatttcttcgtttcaaaactaaacagaatcattcccacaaactgcgttgtgatgtgttcgttcaactcacagagtttaacctttcttttcatagagcagttaggaaacagtctgtttgtaaattctgtaagtggatattctgacatcttgtggccttcgttggaaacgggatttcttcatattctgctagacagaagaattctcagtaacttccttgtgttgtgtgtattcaactcacagagttgaacgatcctttacacagagcagacttaaaacactctttttgtggaatttgcaagtggagatttcagccgctttgaggtcaatagtagaaaaggaaatatcttcgtagaaaaactagacagaatgattctcagaatctcctttgtgatgtgtgcgttcaactcacagagtttaacctttcttttcatagagcagttaggaaacactctgtttgtaaagtctgcaagtggatattcagacctctttgtggccttcgttggaaacgggtttttttcatataaggctagacagaagaattttcagtaacttccttgtgttgtgtgtattcaactcacagagttgaacgatcctttacagagagcagacttgaaacactctttttgtggaatttgcaagtggagatttcagccgctttgaggtcaatggtggaataggaaatatcttcctatagaaactagacagaatcattctcagaatctgcagcgtgatgtctgcgttcaactctcagagtttaacttttcttttcattcagcggtttggaaacactctgtttgtaaagtctgcacgtggatattttgaccacttagaggccttcgttggaaacgggtttttttcatgtaaggctagacagaagaattcccagtaacttccttgtgttgtgtacattcaactcacagagttgaacgttcccttagacagagcagatttgaaacactctttttgtgcaattggcaaatggagatttcaagcgctttaaggtcaatggcagaaaaggaaatatcttcgtttcaaaactagacagaatcattcccacaaactgcgttgtgatgtgttcgttcatctcacagagtttaacctttcttttcatagagcagttaggaaacagtctgtttgaaaattctgtaagtggatattctgacatcttgtggccttcgttggaaacgggatttcttcatattctgctagacagaagaatactgagtaacttccgcgtgttgtgtgtattcaactcacagagttgaacgatcctttacacagagcagacttgaaacactctttttgtggaatttgcaagtggagatttcagccgctttgaggtcaatggtagaaaaggaaatatcttcatataaaaactagacagaatgattctcagaaactcctttgtgatgtgtgcgttcaactcacagagtttaacttttcttttcaaagagcagttaggaaacactctctttgtaaagtctgcaagtggatattcagacctctttgaggccttcgttggaaacgggatttcttcatattctgctagacagaagaattcccagtaacttccttgtgttgtgtgtgttcaactcacagagtggaactttcatttacacagagcagatttgaaacactctttttgtggaatttgcaagtggagatttcaagcgctttgaggccaaaggcagaaaaggaaatatcttcgtttcaaaactagacagaatcattctcagaaactgctgcgtgatgtgtgcgatcaactctcagagtttaacttttcttttcattcagcggtttggaaacactctgtttgtaaagtctgcacgtggatattttgaccacttagaggccttcgttggaaacgggttttattcatgtaaggctagacagaagaattcccagtaacttccttgtgttgtgtgcattcaactcacagagttgaacgttcccttagacagagcagatttgaaacactctatttgtgcaatttgcaagtgtagatttcaagcgctttaaggtcaatggcagaaaaggaaatttcttcgtttcaaaactagacagaatcattcccacaaactgcgttgtgaagtgctcgttcaactcacagattttaacctttctgttcatagagcagttaggaaacactctgtttgtaaagtctgcaagtggatattctgacatcttgcggccttcgttggaaacggaatttcttcatattctgctagacagaagaattctcagtaacttccttgtgttgtgtgtattcaactcacagagttgaacgatcctttacacagagcagacttgtaacactctttttgtggaatttgcaagtggagatttcagccgatttgaagtcaaaggtagaaaaggaaatatcttcctataaaaactagacagaatgattctcagaaactcctttgtgatgtgtgcgttcaactcacagagttcaacctttcttttcatagagcagttgggaaacactctgtttgtaaagtctgcaagtggatattcagacttctttgaggccttcgttggaagcgggatttcttcatgttctagacagaagaattctcagtaacttccttgtgttgtgtgtattcaactgacagagttgaaatttcatttagagggagcagatttgaaacactgtttttgtggaatttgcaagtggagatttcaaacgctttggggccaaaggcagaaaaggaaacatcttcgtataaaaactagacagaatcattctcagaaactgctctgcgatgtgtgcgttaaactctcagagtttaacttttcttttcattcagcagtttggaaacactctgtttgtaaagtctgcacgtggatattttgaccacttagaggccttcgttggaaacgggtttttttcctgtaaggctagacagtagaattcccagtaacttccctgtgttgtgtgcattcaactcacagagttgaacgttcccttagacagagcagatttgaaacactctatttgtgcaatttgcaagtgtagatttcaagcgctttaaggtcaatggcagaaaaggaaatatcttcctttcaaaactagacagaatcattcccacaaactgcgttgtgatgtgttcattcaactcacagagtttaacctttcttttcatagagcagttaggaaacagtctgtttgtcaattctgtaagtggatattctgacatcttgtggccttcgttggaaacgggatttcttcatattctgctagacagaagaattctcagtaacttccttgtgttgtgtgtattcaactcacagagttgaacgatcctttacacagagcagacttgaaacactctttttgtggaatttgcaagtggagatttcagccgctttgaggtcaatggtagaaaaggaaactatcttcatatagagactagacagaatgattctcagaaaatcttttgtgatgtgtgcgttcaactcacagagtttaacttttcttctcatagagcagttaggaaccactctgtttgtaaagtctgcaagtggatattcagacctctttgaggccttcgttggaaacttgatttcttcatattatgctagacagaagaattcccagtaacttccttgtgttgtgtgtgttcaactcacagagttgaactttcatttacacagagcagatttgaaactctctttttgtggaatttgcaagtggagatttcaagcgctttgaggccaaaggcagaaaaggaaatatcttcgtttcaaaaccagacagaatcattctcagaagctgctgcgtgatgtgtgcgttcaactctcagagtttaacttttcttttcattcagcggtttggaaacactctgtttgtgaagtctgcacgtggatattttgaccacttagaggccttcgttggaaacggtttttttgcatgtaaggctagacagaagagttcccagtaacttccttgtgttgtgtacattcaactcacagagttgaacgttcccttagacagagcagatttgaaacactctttttgtgcaattggcaagtggagatttcaagcgctttaaggtcaatggcagaaaaggaaatatcttcgtttcaaaactagagagaatcattcccacaaactgcgttgtgatgtgtttgttcaactcacagagtttaacctttcttttcatagagcagttaggaaacagtctgtttgtcaattctgtaagtggatattctgacatcttgtggccttagttggaaacgggatttcttcatattctgctagacagaagaattctcagtaactttccttgtgttgtgtgtattcaactcacagagttgaacgatcctttacacagagcagacttgaaacactctttttggggaatttgcaagtggagatttcagccgctttgaggtcaatggtagaaaaggaaactatcttcatataaagactagacagaatgattctcataaactcctttgtgatgtgtgcgttcatctcacagagtttaacttttattttcatagagcagttaggaaacactctgtttgtaaagtctgcaagtggatattcagacctccttgaggccttcgttggaaacgggatttcttcatattctgctagacagaagaattctcagtaacttccttgtgttgtgtgtattcaactcacagagttgaacgatcctttacacagagcagacttgaaacactctttttgtggaatttgcaagtggagatttcagccgctttgaggtcaatggtagaaaaggaattatcttcgtataaagactagacagaatgattctcagaatctcctttgtgatgtgtgcgttcaactcacagagtttaacctttcttttcatagagcagttaggaaacactctgtttgtaaagtctgcaagtggatattcagacctctttgatgccttcgttggaaacgggtttttttcatataaggctagacagaagaattcccagtaacttccttgtgttgtgtgcattcaactcacagagttgaacgttcccttagacagagcagatttgaaacactctatttgtgcaatttgcaagtgtagatttcaagcgctttaaggtcaacggcagaaaaggaaatatcttcgtttcaaaactagacagaatgattctcagaaactcctttgtgatgtgtgcgttcaactcacagagttcaacctttcttttcatagagcagttaggaaacactttgtttgtaaagtctgcaagtggatattcagacttctttgaggccttcgttggaagcgggatttcttcatgttctgctagacagaagaattcctcagtaacttcccttgtgttgtgtgtattcaactcgcagagttgaacgatcctttacacagagcagacttgaaacactctttttgtggaatttgcaagtggagatttcagccgctttgaggtcaatagtagaaaaggaaatatcttcgtagaaaaactagacagaatgattctcataaactcctttgtgatgtgtgcgttcaactcacagagtttaacttttgttttcatagagcagttaggaaacactctgtttgtaaagtctgcaagtggatattcagacctctttgaggccttcggtggaaacgggatttcttcatattctgctagacagaagaattcccagtaacttccttgtgttgtgtgttttttaactcacagagttgaactttcatttacacagagcagatttgaaacactctttttgtggaatttgcaagtggagatttcaagcgctttgaggccaaaggcagaaaaggaaatatcttcgtataaaaactagacagaatcattctcagaaactgctgcgtgatgtgtgcgttcaactctcagagtttaacttttcttttcattcagcggtttggaaacactctgtttgtaaagtctgcacgtggatattttgaccacttagaggccttcgttggaaacgggtttttttcatgtaaggctagacagaataattctcagtaacttgcttttgttgtgtgtattcaactcacagagttgaacgatcctttacagagagcagacttgaaacactctttttgtggaatttgcaagtggagatttcagccgctttgaggtcaatggtagaataggaaatatcttcctatagaaactagacagaatgattctcataaactactttgtgatgtgtgcgttcaacacacagagtttaaactttctgttcatagagcagttaggaaacactctgtttgtaaagtctgtaagtggatattctgacatcttgtggccttcgttggaaacgggatttcttcatattctgctagacagaagaattctcagtgacttccttgtgttgtgtgtattcaactcacagagttgaacgatcctttacacagagcagtcttgaaacactctttttgtggaatttgcaagtggagatttctgccgctttgaggtcaatggtagaataggaaatatcttcctatagaaactagacagaatgattctcagaaactcctttgtgatgtgtgcgttcagctcacagagttcaacctttcttttcatagagcagttgggaaacactctgtttgtaaagtctgcaagtggatattcagacttctttgaggccttcgttggaagcgggatttcttcatgttctgctagacagaagaattcccagtaacttccttgtgttgtgtgtgttcaactcacagagctgaactttcatttacacagagcagatttgaaacactctttttgtggaatttgcaaatggagatttcaagcgctttgaggccaaaggcagaaaaggaaatatcttcgtataaaaactagacagaatcattctcagaaactgctctccgatgtgtgcattcagctctcagagtttaacttttcttttcattcaccagtttggaaacactctgtttgtaaagtctgcacgtggatattttgaccacttagaggccttcgttggaagcgggcttttgtcatgtaaggttagacagaatatttcccagtaacttccttgtgttgtgtacattcaactcacagagttcaacgttcccttagacagagcagatttgaaacactctttttgtgaaattggcaagtggagatttcaagcgcttaatgtcaatggcagaaaaggaaatatcttcgtttcaaaaccagacagaatcattcccacaaactgcgttgtgatgtgttcgttcaactcacagagtttaacctttcttttcatagagcagttaggaaaaactctgtttgtaaattctgtaagtggatattctgacatcttgtggccttctttggaaacgagatttcttcatattctgctagacagaagaattctcagtaacttccttgagttgtgtgtattcaactcacagagttgaacgatcctttacacagagcagacttgaaacactctttttgtggaatttgcaactggagatttcagccgcgttgaggtcaatggtagaaaaggaaatatcttcgtataaaaactagacagaatgattctcagaaagtcctttgtgatgtgtgcgttcaactcacagagtttaccctttctgttcatagagcagttaggaaacactctgtttgtaaattctgcaagtggatattcagacctacttgaggtcttcggtggaaacgggatttcttcatattctgctagacagaagagattcccagtaacttcattgtgttgtgtgtgttcaactcacagagttgaactttcatttacacagagcagatttgaaacactctttttgtggaatttgcaaatggagatttcaagcgctttgaggccaaaggcagaaaaggaaatatcttcgtataaaaactagacagaatcattctcagaaactgctgcgtgatgtgtgcgttcaactctcagagtttaacttttcttttcattcagcggtttggaaacactctgtttgtaaagtctgcacgtggatattttgaccacttagaggccttcgttggaaacgggattttttcatgtaaggctagacagaagaattcccagtaacttccttgtgttgtgtgcattcaactcacagagttgaacgttcccttagacagagcagatttgaaacactctatttgtgcaatttgcaattgtagatttcaagcgttttaaggtcaatggcagaaaaggaaatatcttcgtttcaaaactagacagaatgattctcagaaacttctttgtgatgtttgcgttcaactcacagagtttaacctttcttttcatagagcagttaggaaacactctgtttgtaaactctgcaagtggatattcagacctctttgaggccttcgttggaaacgggatttcttcatactatgctagacagaagaattctcagtaacttccttgggttgtgtgtattcaactcacagagttgaacgatcctttacacagagcagacttgaaacactctttttgtggaatttgcaagtggagatttcagccgctttgaggtcaatggtagaaaaggaaatatcttcgtataaagactagacagagtgattctcagaaactcctttgtgatgtgtgtgttcaactcacagagtttaacctttcttttcaagagcagttagtaaacactctgtttataaagtctgcaagtggatattccgacccctttgagtccttcgttggaaacgggatttcttcatattatgctagacagaagaattcccagtaacttccttgtgttgtgtgtgttcaactcacagagttgaactttcatttgcacagagcagatttgaaacactctttttgtggaatttgcaagtggagatttcaagcgctttgaggccaaaggcagaaaaggaaatatctccgtttcaaaactagacagaatcattctcagaaactgctgcttgatgtgtgcgttcaactctcagagtttaacttttcttttcattcagcggtttggaaacactctgtttgtaaagtctgcacgtggacattttgaccacttagaggccttcgttggaaacgggtttttttcatgtaaggctagacagaagaattcccagtaacttccttgtgttgtatgcattcaactcacagagttgaacgttcccttagacagagcagatttgaaacaatctatttgtgcaatttgcaagtgtagatttcaagcgctttaaggtcaatggcagaaaaggaaatatcttcgtttcaaaactagacagaatcattcccacaaactgcgttgtgatgtgttcgttcaactcacagagtttaacctttctgttcatagagcagttaggaaacactctgtaaagtctgtaagtggatattctgacatcttgtggccttcgttgtaaacgggatttcttcatattctgctagacagaagaattctcagtaacttccttgtgttgtgtttattcaactcacagagttgaatgatcctttacacagagtagacttgaaacactctttttgtggaatttgcaagtggagatttcagccgctttgaggtcaatggtagaaaagtaaatatcttcctataaagactagacagaatgattctcagaaactcctttgtgatgtgtgcgttcaactcacagagtttaacctttctgttcatagagccgttaggaaacactctgtttgtaaagtctgcaagtggatattcagacctctttgaggccttcgttggaaacgggatttcttcatattatgctagacagaagaattctcagtaacttccttgtgttgtgtgtattcaactgacagagttgaactttcatttagagagagcagatttgaaacactgtttttgtgggatttgcaagtggagatttcaagcgctttggggccaaaggcagaaaaggaaatatcttcgtataaaaactagacagaatcattctcagaaactgctgcgtgatgtgtgcgttcaactctcagagtttaacttttcttttcattcagcggtttggaaacactctgtttgtaaagtctgcacgtggaaattttgaccacttagaggccttcgttggaaacgggtttttttcatgtaaggctagacagaagaattcccagtaacttccttgtgttgtgtgcattcaacttacagagttgaacgttcccttagacagagcagatttgaaacactctatttgtgcaatttgcaattgtagatttcaagcgctttaaggtcaagggcagaaaaggaaatatcttcgtttcaaaactagacagaatcattcccacaaactgcgttgtgatgtgttcgttcaactcacagagtataacctttctgttcatagagcagttaggaaacactctgtttgtaaagtctgtaagtggatattctgacatcttgtggccttcgttggaaacgggatttattcatattctgctagacagaagaattctcagtaacttccttgtgttgtgtgtattcaactcacagagttgaacgatcctttacacagagcagtcttgaaacactctttttgtggaatttgcaagtggagatttctgctgctttgaggtcaatggtagaataggaaatatcttcctatagaaactagacagaatgattctcagaaactcctttgtgatgtgggcgttcaactcacagagtttaacctttcttttcatagagcagttaggaaacactctgtttgtaaagtctacacgtggatatttggacttctttgaggccttcgttggaaacgggtttttttcatgtaaggctagacggaaagaattctcagtaacttccttgtgttgtgtgtattcaactgacagagttgaactttcatttagagagagcagatttgaaacactgtttttgtggaatttgcaagtggagatttcaagcgctttggggccaaaggcagaaaaggaaatatcttcgtataaaaactagacagatcattctcagaaactgctgtgtgatgtgtgcgttcaactctcagagtttaacttttcttttcattcagcggtttggaaacactctgtttgtaaagtctgcacgtggatattttgaccacttagaggccttcgttggaaacgggtttttttcatgtaaggctagacagaagaattcccagtaacttccttgtgttgtgtacattcaactcacagagttgaacgttcccttagacagagcagatttgaaacactctttttgtgcaattgacaagtggagatttcaagcgctttaaggtcaatggcagaaaaggaaatatcttcgtttcaaaactagacagaatcattcccacaaactgcgttgtgatgtgttcgttcaactcacagagtttaacctttcttttcatagagcagttaggaaacagtctctttgaaaattctgtaagtggatattctgacatcttgtggccttcgttggaaacgggatttcttcatattctgctagacagaagaattctcagaaacttccttgtgttgtgtgttttcaactcacagagttgaacgatcctttacacagagcagacttgaaacactccttttgtggaatttgcaagtggagatttcagccgctttgaagtcaatggtagaataggaaatatcttcctatagaaagtagacagaatgattctcagaaactcctttgtgatgtatgcgttcaactcacagagtttaacctttcttttcatagagcagttaggaaacactctgtttgtaaagtctgcaagtggatattcagacctccttgaggccttcgttggaaacgggtttttttcatgtaaggctagacagaagaattcccagtaacttccttgtgttgtgtgtgttcaactcacagagttgaactttcatttacacagagcagatttgaaacactctttttgtggaatttgcaaatggagatttcaagcgctttgtggccaaaggcagaaaaggaaatatcttcgtataaaaactagacagaatcattctcagaaactgctgcgtgatgtgtgcgttcaactctcagagtttaacttttcttttcattcagcggtttggaaaaactctgtttgtatagactgcacgtggatattttgaccacttagaggccttcgttggaaacgggttttttttcatgtaaggctagacagaagaattcccagtaacttccttgtgttgtgtgcattcaactcacagagttgaacgttcccttagacagagcagatttgaaacactctatttgtgcaatttgcaagtgtagatttcaggcgctttaaggtcaacggcagaaaaggaaatatcttcgtttcaaaactagacagaatgattctcagaaactcctttgtgatgtgtgcgttcaactcacagagtttaacctttctgttcaaagagctgttaggaaacactctgtttgtaaagtctgcaagtggatattcagacctccttcaggccttcgttggaaacgggatttcttcatattctgctagacagaagaattctcagtaacttccttgtgttgtgtgttttcaactcacagagttgaacgatcctttacacagagcagacttgaaacactctttttgtggaatttgcaagtggagatttcagccgctttgagctcaatggtagaataggaaatatcttcctatagaaactagacagaatgattctcagaaactcctttgtgatgtgtgcgttcaactcacagagtttaacctttcttttcatagagcagttaggaaacactctgtttgtaaagtctgcaagtagatattcagacatctttgaggccttcgttggaaacgggatttcttcatgttctgctagacagaagaattctcagaaacttccttgtgttgtgtgttttcaactcacagagttgaacgatgctttacacagagtagacttgaaacactctttttgtgtaatttgcaagtggagatttcagccgctttgaggtcaatggtagaaaaggaaatatcttcgaataaaaactagacagaatcattctcagaaactgctgcgtgatgtgtgcgttcaactctcagagtttaacttttcttttcattcagcggtttggaaacactctgtttgtaaagtctgcacgtggatattttgaccacttagaggccttcgttggaaacgggttttttcatgtaaggctagacagaagaattcccagtaacttccttgtgttgtgtgcattcaactcacagagttgaacagttcccttagacagagcagatttgaaacactctatttgtgcaatttgcaagtgtagatttcaagcgctttaaggtcaatggcagaaaaggaaatatcttcgtttcaaaacttgacagaatgattctcagaaactcctttgtgatgtgtgcgttcaactcacagagtttaacctttcttttcatagagcagttaggaagcactctgttagtaaagtctgcaagtggatattcagacctccttgaggccttcgttggaaaggggatttcttcatattatgctagacagaagaattctcagtaacttccttgtgttgtgtgtattcaactcacagagttgaacgatcctttacacagagcagacttgaaacactctttttgtgaaatttgcaagtggagatttcagccgctttgaggtcaatggtagaataggaaatatcttcctatagaaactagacagaatgattctcagaaactcctttgtgatgtgtgcgttcaactcacagagtttaacctttcttttcatagagcagttaggaaacactctgttggtaaagtctgcaagtggatattcagacctctttgaggccttctttggaaacgggatttcttcatattctgctagacagaagaattcccagtaacttccttgtgttgtgtgtgttcaactcacagagttgaactttcatttacacagagcagatttgaaacactctttttgtataatttgcaaatggagatttcaagcgctttgaggccaaaggcagaaaaggaaatatgcttacttataaaaactagacagaatcattctcagaaactgctctgcgatgtgtgcgttcaactctcagagtttaacttttcttttcattcagcagtttggaaacactctgtttgtaaagtctgcacgtggataacttgaccacttagaggccttcgttggaaacgggattttttcatgtaaggctagacagaagaattctcagtaacttccttgtgttgtgtgtattcaactcacagaattgaacgatcctttacacagagcagacttgtaacactctttttgtggaatttgcaagtggagatttcagccgctttgaagtcaaaggtagaaaagtaaatatcttcctataaaaactagacagaatgattctcagaaaatcctttgtgatgtgtgcgttcaactcacagagtttaacatttcttttcatagagcagttaggaaacactctgtttgtaaagtctgcaagtggatattcagacctctttgaggccttctttggaaacgggatttcttcatattctgctagacagaagaattctcagtaacttccttgtgttgtgtgtattcaactcacagagtggaacgatcctttacacagagcagacttgaaacactctttttgtggaatttgcaagtggagatttcagccgctttgaggtcaatagtggaaaaggaaatatcttcgtagaaaaactagacagaatgattctcagaaactcctttgtgatgtgtgtgttcaactcacagagtttaacctttcttttcatagagcagttagtaaacactctgtttataatgtctgcaagtggatattcagacccctttgaggccttcgttggaaacgggatttcttcatattctgctagacagaagaattcccagtaacttccttgtgttgtgtggattcaactcacagagttgaactttcatttacacagagcagatttgaaacactctttttgtggaatttgcaaatggagatttcaagccctttcaggccaaaggcagaaaaggaaatatcttcgtataaaaactagacagaatcattctcagaaactgctctgcgatgtgtgcgttcaactctccgagtttaacttttcttttcattcagcagtttggaaacactctgtttgtaaagtctgcacgtggataatttgaccacttagaggccttctttggaaacggtttttttttcatgtaaggctagacagaagaattcccagtaacttccttgtgttgtgtgcattcaactcacagagttgaacgttccctagacggagcagatttgaaacactctatttgtgcaatttgcaagtgtagatttcaagcgctttaaggtcaatggcagaaaagggaatatcttcgtttcaaaactagacagaatcattcccacaaactgcgttgtgatgtgtgcgttcaactcacagagtttaacttttcttttcatagagcagttaggaaacactctgtttgtaaagtctgcaagtggatattcagacctctttgaggccttcgttggaaacgggatttcttcatattctgctagacagaagattctcagtaacttccttgtgttgtgtgtattcaactcacagagttgaacgatcctttacacagagcagacttgaaacactctttttgtggaatttgcaagtggagatttcagccgctttgaggtcaatagtagaaaaggaaatatcttcgtagaaaaactagacagaatgattctcagaaactcctttgtgatgtgtgcgttcaacacacagagtttaacttttcttttcatagagcagttagtaaacactctgtttataacgtctgcaagtggatattcagacccctttgaggccttcgttggaaacgggatttcttcatattatgctagacagaagaattcccagtaacttccttgtgttgtgtgtgttcaactcacagagttgaactttcatttacacagagcagatttgaaacactctttttgtggaatttgcaagtggagatttcaagcgctttgaggccaaaggcagaaaaggaaatatcttcgtaaaaaaatagacagaatcattctcagaaactgctctgcaatgtgtgcgttcaactctcagagtttaacttttcttttcattcagcagtttggaaacactctgtttgtaaagtctgcacgtggataacttgaccacttagaggccttcgttggaaacgggtttttttcatgtaaggctagacagaagaattcccagtaacttccttgtgttgtgtgcattcaactcacagagttgaacgttcccttggacagagcagatttgaaacactctatttgtgcaatttgcaagtgtagatttcaagcgcattaaggtcaatggcagaaaaggaaatatcttcgtttcaaaactagacagaatgattctgagaaactcctttgtgatgtgtgcgttcaactcacacagtttaacctttcttttcatagagcagttaggaaacactctgtttgtaaagtctgcaagtggatattcagacttctttgaggccttcgttggaagcgggatttcttcatattctgctagacagaagaattctcagtaacttccttgtgttgtgtgtattcaactcacagaggtgaacgatcctttacacagagcagacttgaaacactctttttgtggaattgcaagtggagatttcagccgctttgaggtcaatggtagaaaaggaaatatcttcgtataaagactagacagaatgattctaagaaaatcttttgtgatgtgtgcgttcaactcacagagtttaacttttcttctcatagagcagttaggaaacactctgtttgtaaagtgtgcaagtggatattcagacctctttgaggccttcgttggaaaagggatttcttcatattatgctagacagaagaattctcagtaacttccttggtgttgtgtgtattcaaatgacagagttgaactttcatttagagagagcagatttgaaacactgtttttgtggaatttgcaagtggagatttcaagcgctttggggccaaaggcagaaaaggaaatatcttcgtataaaaactagacagaatcatcctcagaaactgcactgtgatgtgtgcgttcaactctcagtgtttaacttttcttttcattcagcagtttggaaacactctgtttgtaaagtctgcacgtggatattttgaccacttagaggccttcgttggaaacgggtttttttcatgtaatgctaggcagaagaattcccagtaacttccttgtgttgtgtgcattcaactcacagagctgaactttcccttagacagagcagatttgaaacactctatttgtgcaatttgcaagtgtagatttcaagcgctttaaggtcaatggcagaaaaggaaatatcttcgtttcaaaactagacagaatcattcccacaaacagcgttgtgatgtgttcgttcaactcacagagtttaacctttcttttcatagagcagttaggaaacagtctgtttgtcaattctgtaagtggatattctgacatcttgtggcattcgttggaaacgggatttcttcatattctgctagacagaagaattctcagtaacttccttgtgttgtgtgtattcaactcacagagttgaacgatcctttacacagagcagacttgaaacactctttttgtggaatttgcaagtggagatttcagccgctttcaggtcaatggtagaataggaaatatcttcctatagaaactagacagaatgattctcagaaactcctttgtgatgtgtgcgttcaactcacagagtttaacctttcttttcatagagcagttaggaaacactctgtttgtaaagtctgcaagtggatattcagacctctttcaggccttcgttggaaacgggatgtcttcatattatgctagacagaagaattcccagtaacttccttgtgttgtgtgtgttcgactcacagagttgaactttcatttacacagagcagatttgaaacactctttttgtggaatttgcaagtggagatttcaagcgctttgaggccaaaggcagaaaaggaaatatcttcgtataaaaactagacagaatcattctcagaaactgctctgcgatgtgtgcgttcaactctcagagtttaacttttcttttcattcagcagtttggaaacactctgtttgtaaagtctgcacgtggataacttgaccacttagaggcctttgttggaaatgggtttttttcatgtaaggctagacagaagtattctcagtaacttccttgtgttgtgtgtattcaactcacagagttgaacgatcctttacacagagcggacttgtaacactctttttgtggaatttgcaagtggagatttcagccgctttgaagtcaaagttagaaaaggaaataacttcctataaaaactagacagaatcattcccacaaactgcgttgtgatgtgttcgttcatctcacagagtttaacctttcttttcatagagcagttaggaaacactctgtttgtaaattctgtaagtggatattctgacatcttgtggccttcgttggaaacgggatttcttcatattctgctagacagaagaattctcagtaacttccttgtgttgtgtgtattcaactcacagagttgaacgatcctttacacagagcggacttgaaacactcgttttgtggaatttgcaagtggagatttcagccgcgttgaggtcaatggtagaaaagggaatatcttcgtataaaaactagacagagtgattctcagaaactcctttgtgatgtgtgcgttcaactcacagagtttaacctttcttttcatagagcagttaggaaacactctgtttgtaaagtctgcaagtggatattcagacctccttgaggccttcgttggaaacgggatttcttcatattctgctatacagaagaattctcagtaacttccttctgttgtgtgtattcaactgacagagttgaagtttcatttagagagagcagatttgaaacactgtttttgtggaatttgcaagtggagatttcaagcgctttgggaccaaaggcagaaaaggaaatatcttcgtataaaaactagacagaatgattctcagaaactcctttgtgatgtgtgcgttcaactcacagagtttaacctttcttttcatagagcagttaggaaacactctgcttgtaaagtctgcaagtggatattcagccctctttgaggccttcgttggaaacgggtttttttcacataaggctagacagaagaattcccagtaacttccttgtgttgtgtacattcaactcacagagttgaacgttcccttagacagagcagatttgaaacagtctttttgtgcaattggcaaatggagatttcaagcgctttaaggtcaatggcagaaaaggaaatatcttcgtttcaaaactagacagaatcattcccacaaactgcgttgtgatgtgttcgttcaactcacagagtttaacctttctgttcatagagcagttaggaaacactctgtttgtaaagtctgtaagtggatatactgacatcttgtggccttcgttggaaacgggatttcttcatattctgctagacagaagaattctcagtaacttccttgtgttgtgtgtattcaactcacagagttgaacgatcctttacacagagcagacttgtaacactctttttgtggaatttgcaagaggagatttcagccgctttgaagtcaaaggtagaaaaggaaatatcttcctataaaaactagacagaataattctcagaaactcctttgtgatgtgtgcgttcaactcacagagtttaacctttcttttcatagagcagttaggaaacactctgtttgtaaagtctgcaagtggatattcagacctctttgaggccttcgttggaaacgggtttttttcatataaggctagacagaagaattcccagtaacttccatgtgttgtgtgtgttcaactcacagagttgaactttcattttcacagagcagatttgaaacactctttttgtggaatttgcaaatggagatttcaagcgctttgaggccaaaggcagaaaaggaaatatcttcgtataaaaactagacagaatcattctcagaaactgctgcgtgatgtgtgctttcaactctcagagtttaacttttcttttcattcagcggtttggaaacactctgtttgtaaagtctgcacgtggatattttgaccacttagaggccttcgttggaaacgggtttttttcatgtaaggctagacagaagaattcccagtaacttccttgtgttgtgtacattcaactcacagagttgaacgttcccttagacagagcagatttgaaacactctttttgtgcaattggcaaatggagatttcaagcgctttaagttcaatggcagaaaaggaaatatcttcgtttcaaaactagacagaatcattcccacaaactgcgttgtgatgtgttcgttcaactcacagagtttaacctttctgttcatagaggagttaggaaacactctgtttgtaaagtctgtaagtggatattctgacatcttgtggccttcgttggaaacgggatttcttcatattctgctagacagaagaattctcagtaacttccttgtgttgtgtgtattcaactcacagagttgaacgatcctttacacagagcagacttgaaacactctttttctggaatttgcaagtggagatttcagccgctttgaggtcaattgtagaaaaggaaatatcttcgtataaaaactagacagaatgattctcagaaactcctttgtgatgtctgcgttcaactcacagagtttaacctttcttttcatagagcagttaggaaacactctgtttgtatagtctgcacgtggatatttggacttctttgaggccttcgttggaaacgggtttttttcatgtaaggctagacagaagaattctcagtaacttccttctgttgtgtgtattcaactgacagagttgaactttcatttagagagagcagatttgaaacactgtttttgtggaatttgcaagtggagatttcaagcgctttggggccaaaggcagaaaaggaaatatccttcgtataaaaactagacagaatcattctcagaaactgctctgcgatgtgtgcgttcaactctcagagtttaagttttcttttcattcagcagtttggaaacactctgtttgtaaagtctgcacgtggatattttgaccacttagaggccttcgttggaaacgggtttttttcctgtaaggctagacagaagaattcccagtaacttccttgtgttgtgtacattcaactcacagagttgaaagttcccttagacacagcagatttgaaacactctttttgtgcaattggcaaatggagatttcaagcgctttaaggtcaatggcagaaaaggaaatatcttcgtttcaaaactagacagaatcattctcagaaactgctctgcgatgtgtgcgttcaactctcagagtttaacttttcttttcattcagcagtttggaatcactctgtttgtaaagtctgcacgtacataatttgaccacttagaggccttcgttggaaacaggtttttttcatgtaaggctagacagaagaattctcagtaacttccttgtgttgtgtgtattcaactcacacagttgaacgatcctttacacagagcagacttgtaacactctttttgtggaatttgcaagtggagatttcagccgctttgaagtcaaaggtagaaaaggaaatatcttcctataaaaactagacagaatgattctcagaaacttctttgtgatgtgtgcgttcaactcacagagttcaacctttcttttcatagagcagttaggaaacactctatttgtaaactctgcaagtggatattcagacctctttgaggccttcgttggaaacgggatttcttcatactatgctagacagaagaattctcagtaacttccttgtgttgtgtgtattcaactgacagagttgaactttcatttagagagagcagatttgaaacactgtttttgtggaatttgccagtggagatttcaagcgctttggggccaaaggcagaaaacgaaatatcttcgtataaaaactagacagagtcattctcagaaactgctctgtgatgtgtgcgttcaactctcagagtttaacttttcttttcattcagcagtttggaaacactctgtttgtaaagtctgcacgtggataatttgaccacttagaggccttcgttggaaacgggtttttttcatgtaaggctagacagaagaattcccagtaacttccttgcgttgtgtacattcaactcacagagttgaacgttcccttagacagagcagatttgaaacactctttttgtgcaattggcaagtggagatttcaagcgctttaaggtcaatggcagaaaaggaaatatcttcgtttcaaaactagacagaatcattcccacaaactgcgttgtgatgtgttcgttcaactcacagagtttaacctttcttttcatagagcagttaggaaacactctgttgttaaattctgtaagtggatattctgacatcttgtggccttcgttggaaacgggatttctacatattctgccagacagaacaattctcagtaacttccttgtgttgtgtgtattcaactcacagagttgaacgatcctttacagagagcagacttgaaacactctttttgtggaatttgcaagtggagatttcagccgctttgaggtcaatggtagaataggaaatatcttccaatagaaactagacagaatgattctcagaaactcctttgtgatgtgtgtgttcaactcactgagtttaacctttcttttcatagagcagttaggaaacactctgtttgtaaagtctgcaagtggatattcagacctctttgaggccttcgttggaaacgggattttttcatataaggctagacagaggaattcccagtaacttccttgtgttgtgtgtgttcaactcacagagttgaactttcatttacacagagcagatttgaaacactctttttgtggaatttgcaagtggagatttcaagcgctttgaggccaatgcagaaaaggaaatatcttcgtataaaaactagacagaatcattctcagaaactgctctgcgatgtgtgcgttcaactctcagagtttaacttttcttttcattcagcagtttggaaacaatctgtttgtaaagtctgcacgtggataatttgaccacttagaggccttcgttgcaaacgggtttttttcctgtaaggctagacagaagaattcccaggaacttccttgtgttgcgtacattcaactcacacatttgaacgttcccttagacagagtagatttgaaacactctttttgtgcaattggcaagtggtgatttcagccgctttgaggtcaatggtagaaaaggaaatatcttcatataaaaactagacagataatcattcccacaaactgcgttgtgatgtgttcgttcaactcacagagtttaacctttctgttcatagagcagttaggaaacactctgtttgtaaagtctgtaagtggatattctgacatcttgtggccttcgttggaaacgggatttcttcctattctgctagacagaagaattctcagtaacttccttgtgttgtgtgtattcaactcacagagttgaacgatcctttacacagagcagacatgtaacactctttttctggaatttgcaagtggagatttcagccgctttgaagtcaaaggtagaaaaggaaatatcttcctataaaaactagacagaatgattctcagaaactcctttgtgatgtgtgcgttcaactcacagagtttaacctttcttttcatagagcagttaggaaacactctgtttgtaaagtctgcaagtggatattcagacctctttgaggccttcgatggaaacgggatttcttcatattctgctagacagaagaattctcagtaacttccttgtgttgtgtgtattcaactcacagagttgaacgatcctttacacagggcagacttgaaacactctttttggggaatttgcaagtggagatttcagcctctttgaggttaatggtagaaaatgaaatatcttcgtatagaaactagacagaatcattctcagaaactgctctgtgatgtgtgcgttcaactctcagagtttaacttttcttttcattcagcagtttggaaacactctgtttgtaaagtctccacgtggataatttgaccacttagaggccttcgttggaaacgggtttttttcatgtaaggctagacagaagaattcccagtaacttccttgtgttgtgtacattcaactcacagagctgaacgttcccttagacagagcagatttgaaacactctttttgtgcaattggcaagtggtgatttcagctgctttgaggtcaatggtagaaaagggaatatcttcgtataaaaactagacagaatcattctcagaaactgctctgcgatgtgtgcgttcaactctcagagtttaacttttcttttcattcagcagtttggaaacactctgtttgtaaagtctgcacgtggataatttgaccacttagaggccttccttggaaacgggtttttttcatgtaagtctagacagaagaattcccagtaacttccttgtgttgtgtacattcaactcacagagttgaacgtttccttagacagagcagatttgaaacactctttttgtgcaattggcaagtggtgatttcagccgctttgaggtcaatggtagaaaaggaaatatcttcgtaaaaaaactagacagaatgattctcagaaacttcattgtgatgtgtgcgttcaactcacagagtttaacctttcttttcatagagcagttaggaaacactctgtttgtaaactctgcaagtggatattcacacctctttgaggccttcgttggaaacgggatttcttcatactgtgctagacagaagaattctcagtaacttccttgtgttgtgtgtattcaactcacagagttgaacgatcctttacacagagcagacttgaaacactctttttgtggaatttgcaagtggagatttcagccgcgttgaggtcaatggtagaaaaggtaatatcttcgtataaaaactagacagaatcattctcagaaactgctgcgtgatgtgtgcgttcaactctcagagtttaacttttcttttcattcagcggtttggaaacactctgtttgtaaagtctgcacgtggaaattttgtccacttagaggccttcgttggaaacgggtttttttcatgtaaggctagacagaagaattcccagtaacttccttgtgttgtgtgcattcaactcacagagttgaacgttcccttagacagagcagatttgaaacactctatttgtgcaatttgcaagtgtagttttcaagctctttaaggtcaacggcagaaaaggaaatatcttcgtttcaaaactagacagaatgattctcagaaactcctttgtgatgtgtgcgttcaactcacagagtttaacctttcttttcatagagcagttgggaaacactctgtttgtaaagtctgcaagtggatattcagacctccttgaggctttcgttggaaacgggatttcttcatattctgctagacagaataattctcagtaacttccttgtgttgtgtgtattcaactcacagagttgaacgatcctttacacagagcaaacttgaaacactctttttgtggaatttgcaagtggagatttcagccgctttgaggtcaatggtagaataggaaatatcttcctatagaaactagacagagtgattctcagaaactcctttgtgatgtgtgcgttcaactcacagagtttaacctttcttttcatagagcagttaggaaacactctgtttgtaaagtctgcaagtggatattcagacatccttgaggctttcgttggaaacgggatttcttcatattctgctagaaagaagaattcccagtaacttccttgtgttgtgtgtgttcaactcacagagttgaactttcatttacacagagcagatttgaaacactctttttgtgcaatttgcaagtggagatttcaagcgctttgaggccaaaggcagaaaaggaaatatcttcgtttcaaaactagacagaatcattctcagaaactgctgcgtgatgtgtgcgttcaacactcagagtttaacttttcttttcattcagcggtttggaaacactctgtttgtaaagtctgcacgtggataatttgaccacttagaggccttcgttggaaacgggattttttcatgtaaggctagacagaagaattcccagtaacttccttgtgttgtgtgcattcaactcacagagttgaacgttcccttagacagagcagatttgaaacactctatttgtgcaatttgcaagtgtagttttcaagctctttaaggtcaacggcagaaaaggaaatatcttggtttcaaaactagacagaatgattctcagaaacttctttgtgatgtgtgcgttcaactcacacagtttaacctctcttttcatagagcagttaggaaacactctgtttgtaaagtctgcaagtggatattcagacctccttgaggccttcgttggaaacgggatttcttcatattatgctagacagaagaattctcagtaacttccttgttttgtgtgtattcaactcacagagttgaacgatcctttacacagagcagacttgtaacactctttttgtggaatttgcaagtggagatttcagccgctttgaagtcaaaggtagaaaaggaaatatcttcctataaaaactaaacagataatgattctcagaaactcctttgtgatgtgtgcgttcaactcacagagtttaacctttcttttcatagagcagttagtaaacactctgtttataaagtctgcaagtggatattcagacccctttgaggccttcgttggaaacgggatttcttcatattctgctagacagaagaattctcagtaacttccttgtgttgtgtgtattcaactcacagagttgaactttcatttggagagagcagatttgaaacactgtttttgtggaatttgcaagtggagatttcaagcgctttggggccaaaggcagaaaaggaaatatcttcgtataaaaacgagacagaatcattctcagaaactgctgcgtgatgtgtgcgttcaactctcagagtttaacttttcttttcattcagcggtttggaaacactctgtttgtaaagtctgcacgtggatattttgaccacttagaggccttcgttggaaacgggtttttttcaagtaaggctagacagaagaattctcagtaacttccttgtgttgtgtgtattcaactcacagagttaaacgatcctttacacagaggagacttgtaacactctttttgtggaatttgcaagtggagatttcagccgctttgaagtcaaaggtagaaaaggaaatatcttcctataaaaactagacagaatcattcccacaaactgcgttgtgatgtgttcgttcatctcacagagtttaacctttcttttcgtagagcagttaggaaacagtctgtttgtaaattctgtaagtggatattctgacatcttgtggccttcgttggaaacgggatttcttcatattctgctagacagaagaattctcagtaacttccttgtgttgtgtgtattcaactcacagagttgaatgatcctttacacagaacagtcttgaaacactctttttgtggaatttgcaagtggagatttcatccgctttgaggtcaatggtagaataggaaatatcttcctatagaaactagacagaatgattctcagaaacttctttgtgatgtgtgcgttcaactcacagagtttaacctttcttttcatagagcagttaggaaacactctgtgtgtaaactctgcaagtggatattcagacctgtttgaggccttcgttggaaacgggatttcttcatactatgctagacagaagaattccaagtaacttccttgtgttgtgtgtgttcaactcacagagttgaactttcatttacacagagcagatttgaaacactctttttgtggaatttgcaagtggagatttcaagcgctttgagggcaaaggcagaaaaggaaatatcttcgtttcaaaactagacagaatcattcccacaaactgcgttgtgatgtgttcgttcagctcacagagtttaacctttcttttcatagagcagttaggaaacactctgttggtaaattctgtaagtggatattctgacatcttgtggccttcgttggaaacgggatttcttcatattctgctagacagaagaattcccagtaacttccttgtgttgtgtgcattcaactcacacagttgaacgttccgttagacagagcagatttgaaacactctttttgtgcaatttgcaagtggagatttcaagcgctttagggtcaatggcagaaaaggaaatatcttcgtttcaaaactagacagaatcattcccacaaactgcgttgtgatgtgttcgttcaactcacagagtttaacctttcttttcatagagcagttaggaaatactctgtttgtaaagtctgcaagtggatattcagacctctttgaggccttcgttggaaacgggatttcttcatattctgctggacagaagaattctcagaatcttccttgtgttgtgtgtattcaactcacagagttgaacgatcctttacacagagcagacttgaaacactctttttgtggaatttgcaagtggagatttcagccgctttgaagtcaaaggtagaaaaggaaataacttcctataaaaactagacagaatgattctcagaaactcctttgtgatgtgtgcgttcaactcacacagtttaacctttcttttcatagagcagttaggaaacactctgtttgtaaagtctgcaagtggatattcagacctccttgaggccttcgttggaaacgggatttcttcatattatgctagacagaagaattctcagtaacttccttgtgttgtgtgtattcaactcacagagttgaacgatcctttacacagagcagacttgaaacactctttttgtggaatttgcaagtggagatttcagccgctttgaggtcaatggtagaataggaaatatcttcatatagaaattagacagaatcattctcagaaactgctctgcgatgtgtgtgttcaactctcagagtttaacttttcttttcattcagcagtttggaaacactctgtttgtaaagtctgcacgtggatattttcaccacttagaggccttcgttggaaacgggtttttttcctgtaaggctagacagaagaattcccagtaacttccttgtgttgtgtacattcaactcacagagttgaacgttcccttagacagagcagatttgaaacactctttttgtgcaattggcaaatggagatttcaagcgctttaaggtcaatggcagaaaaggaaatatcttcgtttcaaaactagacagaatgattctcagaaactcctttgtgatgtgtgcgttcaactcacagagttcaacctttcttttcatagagcagttgggaaacactctgtttgtaaagtctgcaagcggatattcagacttctttgaggccttcgttggaagcgggatttcttcatattctgctagacagaagaattctcagtaacttccttgtgttgtgtgtattcaactcacagagttgaacgatcctttacacagagcagacttgaaacactctttttgtggaatttgcaagtggggatttcagccgctttgaggtcaatggtagaataggaaatatcttcctatagaaactagacagaatgattctcagaaactcctttgtgatgtgtgcgttcaactcacagagtttatcctttcttttcatagagcagttaggaaacactctgtttgtaaagtctgcaagtggatattcagacatccttgaggctttcgttggaaacgggatttcttcatattctgctagaaagaagaattctcagtaacttccttgtgttgtgtgtattcaactcacagagttgaacgatccttttcacagagcagacttgaaacactctttttgtggaatttgcaagtggagatttcagccgctttgaggtcaatggtagaataggaaatatcttcctaaagaaactagacagaatcattctcagaaactgctgcgtgatgtgtgcgttcaactctcagagtttaacttttcttttcattcagcggtttggaaacactctgtttgtaaagtctgcacgtggatattcagacctctttgaggccttcgttggaaacgggtttttttcatgtaaggctagacagaagaattcccagtaacttccttgtgttgtgtgcattcaactcacagagttgaacgttcccttagacagagcagatttgaaacactctatttgtgcaatttgcaagtgtagatttcaagcgcattaaggtcaatggcagaaaaggaaatatcttcgtttcaaaattagacagaatcattcccacaaactgcgttgtgatgtgttcgttcaactcacagagtttaacctttctgttcatagagcagttaggaaacactctgtttgtaaagtctgcaagtggatattcagacctccttgaggccttcgttggaaacgggatttcttcatattctgctagacagaagaattctcagtaacttccttgtgttgtgtgtattcaactcacagagttgaccgatcctttacacagagcagacttctaacactctttttgtggcatttgcaagtggagatttcagccgctttgaagtcaaaggtagaaaagggaatatcttcctataaaaactagacagaatgattctcagaaacttctttgtgatgtgtgcgttcaactcacagagtttaacctttcttttcatagagcagttaggaaacactctgtttgtaaagtctgcaagtggatattcagacctctttgaggccttcgttggaaacgggttttttacatataaggctaaacagaagaattccccagtaacttccttgtgttgtgtgtgttcaactcacagagttgaactttcatttacacagagcagatttgaaacactctttttgtggaatttgcaagtggagatttcaagcgctttgaggccaaaggcagaaaaggaaatatcttcgtataaaaactagacagaatcattctcagaaactgctgcgtaatgtgtgcgttcaactctcagagtttaacttttcttttcattcagcggtttggaaacactctgtttgtaaagtctgcacgtggaaattttgaccacttagaggccttcgttggaaacgggtttttttcatgtaaggctagacagaagaattcccagtaacttccttgtgttgtgtgcattcaactcacagagttgaacgttcccttagacagagcagatttgaaacactctatttgtgcaatttgcaagtgtagatttcaagcgctttaaggtcaacggcagaaaaggaaatatcttcgtttcaaaactagacagaatcattcccacaaactgcgttgtgatgtgttcgttcaactcacagagtttaacctttctgttcatagagcagttaggaaacactctgtttgtaaagtctgtaagtggatattctgacaacttgtggccttcgttggaaacgggatttcttcctattctgctagacagaagaattctcagtaacttccttgtgttgtgtgtattcaactcacagagttgaacgatcctttacacagagcagacttgaagcactctttttgtggaatttgcaagtggagattccagcctctttgaggtcaatagtagaaaaggaaatatcttcgtagaaaaactagacagaatgattctcataaactcctttgtgatgtctgcgttcaactcacagagtttaacctttcttttcatagagcagttaggaaacactctgtttgtaaagtctgcaagtggatattcagacctctttgaggccttcgttggaaacgggatttcttcatattatgctagacagaagaattctgagtaacttccttgtgttgtgtgtattcatctgacagagttgaactttcagttagacagagcagaattcaaacactgtttttgtggaatttgcaagtggagatttcaagcgctttggggccaaaggcacaaaaggaaatatcttcgtataaaaattagacagaatcattctcagaaactgctctgcgatgtgtgcgttcaactctcagagtttaacttttcttttcattcagcagtttggaaacactctgtttgtaaagtctgcacgtggataacttgaccacttagaggacttcgttggaaacgggtttttttcctgtaaggctagacagaagaattcccagtaacttccttgtgttgtgtgcattcaactcacagagttgaacgttcccttagacagagcagatttgaaacactctatttgtgcaatttgcaagtgtagttttcaagctctttaaggtcaacggcagaaaaggaaatatcttcgtttcaaaactagacagaatcattcccaaaaactgcgttgtgatgtgttcgttcatctcacagagtttaacctttcttttcatagagcagttaggaaacactctgtttgtaaattctgtaagtggatattctgacatcttgtggccttcgttggaaacgggatttcttcatattctgctagacagaataattcttagtaatttccttgtgttgtgtgtattcaactcacagagttgaaggatcctttacagagagcaggcttgaaacactctttttgtcgaatttgcaagtggagatttcagccgctttgaggtcaatggtagaataggaaatatcttcttatagaaactagacagaatgattctcagaaactcctttgtgatgtgtgcgttcaacacacacagtttaacctttcttttcatagagcagttaggaaacactctgtttgtaaagtctgcaagtggatattcagacctccttgaggccttcgttggaaactggatttcttcatattatgctagacagaagaattctcagtaacttcccttgtgttgtgtgtattcaactgacagagttgaactttcatttggagagagcagatttgaaacactgtttttgtggaatttgcaagtggagatttcaagcgctttggggccaaaggcagaaaaggaaatatcttcgtagaaaaactagacagaatcattctcagaaactgctgcgtgatgtgtgcgttcaactctcagagtttaacctttcttttcattcagcggtttggaaacactctgtttgtaaagtctgcacgtggatattttgaccacttagaggccttcgttggaaacgggtttttttcatgtaaggctagacagaagaattcccagtaacttccttgtgttgtgtacattcaactcacagagttgaacgttcccttagacagagcatatttgaaacactctttttgtgcaattggcaagtggagatttcaagcgctttaaggtcaatggcagaaaaggaaatatcttcgtttcaaaactagacagaatgattctcataaactcctttgtgatgtgtgcgttcaacacacagagtttaacctttctgttcatagagcagttaggaaacactctgtttgtaaagtctgtaagtgcatattctgacatcttgtggccttcgttggaaacgggatttcttcatattctgctagacagaagaattctcagtaacttccttgtgttgtgtgtattcaactcacagggttgaacgatcctttacacagagcagacttgaaacactctttttgtggaatttgcaagtggcgatttcagcctctttgaggtcaatggtagaataggaaatatcttcctatagaaaatagacagaatgattctcagaaactcctttgtgatgtgtgcgttcaactcacagagtttaacctttctttttatagagcagttaggaaacactctgtttgtaaagtctgcaagtggatattcagacctccttgaggccttctttggaaacgggatttcttcctattatgctagacagaagaattctcagtaacttccttgtgttgtgtgtattcaactgacagagttgaactttcatttagagagagcagatttgaaacactgtttttgtggaatttgcaaatggagatttcaagcgctttggggccaaaggcagaaaaggaaatatcttcggtataaaaactagacagaatcattctcagaaactgctctgtgatgtgtgcgttcaactctcaggagtttaacttttcttttcattcagcagtttggaaacactctgtttgtaaagtctgcacgtggataatttgaccacttagaggccttcgttggaaacgggtttttttcatgtaaggctagacagaagaattcccagtaacttccttgtgttgtgtgcattcaactcacagagttgaaagttcccttagacagagcagatttgaaacactctatttgtgcaatttgcaagtgtagatttcaagcgctttaaggtcaacggcagaaaaggaaatatcttcgtttcaaaactagacagaatcattcccacaaactgcgttgtgatgtgttcgttcaactcacagagtttaacctttcttttcatagagcacttaggaaacagtctgtttgtaaattctgtaagtggatattctgacatcttgtgcccttcgttggaaacgggatttcttcatattctgctagacagaagaattctcagaatcttccttgtgttctgtgtattcaactcacagagttgaacgatggtttacacagagcagatttgaaacactctttttgtggaattagcaagtggagatttcagccgctttgaggtcaatggtagaaaaggaaatatcttcgtataaaaactagacagaatgattctcagaaaatcttttgtgatgtgtgcgttcaactcacagagtttaacttttcttctcatagagcagttaggaaacactctgtttgtaaagtctgcaagtggatattcagacctctttgaggccttcgttggaaacgggatttcttcatattatgccagacagaagaattcccagtaacttccttgtgttgtgtttgttcaactcacagagttgaactttcatttacacagagcagatttgaaacactctttttgtggaatttgcaagtggagatttcaagcgctttgaggccaaaggcagaaaaggaaatatcttcgtttcaaaactagacagaatcattctcagaaagtgctctgcgatgtgtgcgttcaactctcagagtttaactttgcttttcattcagcagtttggaaacactctgtttgtaaagtctgcacgtggataatttgaccacttagaggccttcgttggaaacgggtttttttcatgtaaggctagacagaagaattcccagtaacttcccttgtgttgtgtacattcaactcacagagttgaacgttcccttagacagagcagatttgaaacactctttttgggcaattggcaagtggagattacaagcgctttaaggtcaatggcagaaaaggaaatatcttcgtttcaaaactagacagaatcattcccacaaactgcgttgtgatgtggtcgttcaactcacagagcttaacctttctgttcatagagcagttaggaaacactctgtttgtaaagtctataagtggatattctgacatcttgtggccttcgttggaaacgggatttcttcatattctgctagacagaataattctcagtaacttccttgtgttgtgtgtattcaactcagagagttgaacgatcctttacagagagcagacttgaaacactctttttgtggaatttgcaagtggagatttcagccgctttgaggtcaatggtagaaaaggaaatatcttcgtataaagactagacagaatgattctcagaaactcctttgtgatgtgtgcgttcaactcacagagtttaacctttcttttcatagagcagttaggaaacactctgtttctaaagtctgcaagtggatattcagacatctttggggccttcgttggaaacgggatttcttcatgttctgctagacagaagaattcccagtaacttccttgtgttgtgtacattcaactcacagagttgaacgttcccttagacagagcagatttgaaacacactttttgtgcaattggcaagcggagatttcaagcgctttaaggtcaatggcagaaaaggaaatatcttcgtttcaaaactagacagaatcattctcagaaactgctctgcgatgtgtgcgttcaactctcagagtttaacttttcttttcattcagcagcttggaaacactctgtttgtaaagtctgcacgtggatattttgaccacttagaggccttcgttggaaacgggtttttttcctgtaaggctagacagaagaattcccagtaacttccttgtgttgtgtgcattcaactcacagagttgaacgttcccttagacagagcagatttgaaacactctatttgtgcaatttgcaagtgtagatttcaagcgctttaaggtcaatggcagaaaaggaaatatcttcgtttcaaaactagacagaatcattcccacaaactgcgttgtgatgtgttcgttcaactcacagagtttaacctttcttttcatagagcagttaggaaacagtctgtttgtcaattctgtaagtggatattctgacatcttgtggcattcgttggaaacgggatttcttcatattctgctagacagaagaattctcagtaacttccttgtgttgtgtgtattcaactcacagagttgaacgatcctttacacagagcagacttgaaacactctttttgtggaatttgtaagtggagatttcagccgcgttgaggtcaatggtagaaaaggaaatatcttcgtataaaaactagacagaatgattctcagaaactcctttgtgatgtgtgtgttcaactcacagagtttaacctttcttttcatagagcagttaggaatcactctgtttgtaaagtctgcaagtggatattcagacctctttgaggccttcgttggaaacgggtttttttcatataaggctagacagaagaattctcagtaacttcccctgtgttgtgtgtattcaactgacagagtcgaactttcatttagagagagcagatttgtaacactgtttttgtggaatttgcaagtggagatttcaagcgctttggggccaaaggcagaaaaggaaatatcttcgtataaaaactagacagaatcattctcagaaactgctgcgtgatgtatgcgttcaactctcagagtttaacttttcttttcattcagcagtttggaaacactctgtttgtaaagtctgcacgtggatattttgaccacttagaggccttcgttggaaacgggtttttttcatgtaaggctagacagaagaattcccagtaacttccttgtgttgtgtgcattcaactcacagagttgaacgttcccttagacagagcagatttgaaacactctatttgtgcaatttacaagtgtagttttcaagctctttaaggtcaacggcagaaaaggaaatatcttcgtttcaaaactagacagaatgattctcataaactcctttgtgatgtgtgcgttcaactcacagagtttaacctttcttttcatagagcagttaggaaacactctgtttgtaaagtctgcaactggatattcagacctctttgaggccttcgttggaaacgggatttcttcatattctgctagacagaagaattctcagtaacttctttgtgttgtgtgtattcaactcacagagttgaacgatcctttacacagagcagacttgaaacactctttttgtggaatttgcaagtggagatttcagccgctttgaggtcaatggtagaataggaaatatcttcctatagaaaatagacagaatgattctcagaaactcctttgtgatgtgtgcgttcaactcacagagtttaacctttcttttcatagagcagttaggaaacactctgtttgtaaagtctgcaagtggatactcagacctccttgaggccttcgttggaaacgggatttcttcatattatgctagacagaagaattctcagtaacttcccttgtgttgtgtgtattcaactcacagagttgaacgatcctttacagagagcagacttgaaacactctttttgtggaatttgcaagtggagatttcagccgctttgtggtcaatggtagaataggaaatatcttcctatagaaactagacagaatgattctcagaaactcctttgtgatgtgtgcgttcaactcacagagtttaacctttcttttcatagagcagttaggaaacactctgtttgtaaagtctacaagttgatatacagacctctttgaggccttcgttggaaacgggatttcttcatattctgctagagagaagaattcccagtaacttccttgtgttgggtgcattcaactcacagagttgaacgttcccttagacagagcagatttgaaacagcctatttgtgcaatttgcaagtgtagatttcaagcgctttaaggtcaactgcaggaaaggaaatatcttcctttcaaaactagacagaatcattcccacaaactgcgttgtgatgtgttcgttcaactcacagagtttaacctttctgttcatagagcagttaggaaacactctgtttgtaaagtcagtaagtggatattctgacatcttgtggcctttgttggaaacgggatttcttcatattctgctagacagaataattctcagtaacttccttgtgttgtgtgtattcaactcacagtagttgaacgatcctttacagagagcagacttgaaacactctttttgtggaattcgcaagtggagatttcagccgctttgaggtcaatggtagaaaaggaaatgtcttcgtataaagactagacagaatgattctcagaaactcctttgtgatgtgtgcgttcaactcacagagtttaacctttcttttcatagagtagttaggaaacactctgcttgtaaagtctgcaagtggatattcagccctctttgaggccttcgttggaaacgggtttttttcatataaggctagacagaagaattctcagtaacttccttgtgttgtgtgtattcaactgacagagttgaactttcatttagagagagcagatttgaaacactgtttttgtggaatttgcaagtggagatttcaagcgctttggggccaaaggcagaaaaggaaatatcttcgtataaaaactacacagaatcattctcagaaagtgctctgcgatgtgtgcgttcaactctcagagtttaactttgcttttcattcagcagtttggaaacactctgtttgtaaagtctgcacgtggataatttgaccacttagaggccttcgttggaaacgggtttttttcatgtaaggctagacagaagaattcccagtaacttccttgtgttgtgtgcattcaactcacagagttgaacgttcccttagacagagcagatttgaaacactctatttgtgcaacttgcaagtgtagttttcaagctctttaaggtcaacggcagaaaaggaaatatcttcgtttcaaaactagacagaatgattctcagaaactcctttgtgatgtgtgcgttcaactcacagagtttaacttttcttttcaaagagcagttaggaaacactctctttgtaaagtctgcaagtggatattcagacctctttgaggccttcgttggtaacgggatttcttcatattctgctagacagaagaattctcagtaacttccttgtgttgtgtgtattcaactcacagagttgaacgatcctttacacagagcagacttgaaacattctttttgtggaatttgcaagtggagatttcagccgctttgaggtcaatagtagaaaaggaaatatcttcgtagaaaaactagacagaatgattctcagaaactcctttgtgatgtgtgcgttcaactcacagagtttaacctttcttttcatggagcagttaggaaacactctgtttgtaaagtctgcaaggggatattcagacctctttgaggctttcgttggaaacgggatttcttcatattctgctagacagaagaattcccagtaacttccttgtgttgtgtgttttcaactcacagagttgaactttcatttacccagagcagatttgaaacactctttttgtggaatttgcaagtggagatttcaagcgctttgaggccaaaggcagaaaaggaaatatcttcgtttcaaaactagacagaatcattctcagaaactgctgcgtgatgtgtgcgttcaactctcagagtttaacttttcttttcattcagcggtttggaaacactctgtttgtaaagtctgcacgtggatattttgaccacttagaggccttcgttggaaacgggttttcttcatgtaaggctagacagaagaattcccagtaacttccttgtgttgtgtacattcaactcacagagttgaacgttcccttagacagagcagatttgaaacactctttttgtgcaattggcaagtggagatttcaagcgctttaaggtcaatggcagaaaaggaaatatcttcgtttcaaaactagacagaatcattcccacaaactgcgttgtgatgtgttcgttcaactcacacagtttaacctttcttttcatagagcagttaggaaacactctgttggtaaattctgtaagtggatattctgacatcttgtggcctccgttggaaacgggatttcttcatattctgctagacagaataattctcagtaacttccttgtgttgtgtgtattcaactcacagagttgaacgatcctttacagagagcagatttgaaacactctttttgtggaatttgcaagtggagatttcagccgctttgaggtcaaaggtagaatagcaaatatcttcctatagaaactagacagaacgattctcagaaactcctttgtgatgtgtgcgttcaactcacagagtttaacctttcttttcatagagcagttaggaaacactctgtttgaaaagtctgcacgtggatattcagacctctttgaggccttcgttggaaacgggatttcttcctattctgctagacagaagaattcccagtaacttcctagtgttgtgtgtgttcaactcacagagttgaactttcatttacacagaacagatttgaaacactctttttgtggaatttgcaagtggagatttcaagcgctttgaggccaaaggcagaaaaggaaatatcttcgtataaaaactagacagaatcattctcagaaactgctctgcgatgtgtgcgttcaactctcagagtttaacttttcttttcattcagcaatttggaaacagtctgtttgtaaagtctgcacgtggataacttgaccacttagaggccttcgttggaaacgggtttttttcatgtaaggctagacagaagaattcccagtaacttccttgtgttgtgtgcattcaactcacagagttgaacgttcccttagacagagcagatttgaaacactctatttgtgcaatttgcaagtgtagatttcaagcgctttaaggtcaatggcagaaaaggaaatatcttcgtttcaaaactagacagaatgattctcagaaactgctttgtgatgtgtgcgttaaactcacagagtttaacctttcttttcatagagcagttaggaaacactctgtttgtaaagtctgcaagtggatattcagacatctttgaggctttcgttggaaacgggatttcttcatattctgctaggcagaagaattctcagaaacttcgatgtgttgtgtgttttcaactcacagagttcaacgatcatttacacagagtagacttgaaacactctttttgtggaattggcagggtggagatttcagccgctttgaggtcaatggtagaaaaggaaatatcttcgtataaaaactagacagagtgattctcagaaactcctttgtgatgtctgcgttcaactcacagagtttaacctttcttttcatagagcagttaggaaacactctgtttgtaaagtctgcaagcggatattcagacctccttgagggcttcgttggaaacgggatttcttcatattatgctagacagaagaattcccagtaacttccttgtgttgtgtttgttcaactcacagagttgaactttcatttacacagagcagatttgaaacactctttttgtggaatttgcaaatggagatttcaagcgctttgaggccaaaggcagaaaaggaaatatcttcgtataaaaactagacagaatcattctcagaaactgctgcgtgatgtatgcgttccactatcagagtttaacttttcttttcattcagcggtttggaaacactctgtttgtaaagtctgcacgtggatattttgaccacttagaggccttcgttggaaacgggttttttgcatgtaaggctagacagaagaattcccagtaacttccttgtgttgtgtgcattcaactcacagtgttgaacgttcccttagacagagcagatttgaaacactctatttgtgcaatttgcaagtgtagatttcaagcgctttaaggtcaatggcagaaaaggaaatatcttcgtttcaaaactagacagaatcattcccacaaactgcgttgtgatgtgttcgttcacctcacagagtttaacctttctgttcatagagcagttaggaaacactctgtttgtaaagtctgtaagtggatattctgacatcttgtggccttcgttggaaacgggatttcttcatattctgctagacagaagaattctcagtaacttccttgtgttgtgtgtattcaactcacagagttgcaggatcctttacacagagcagacttgaaacactctttttctggaatttgcaagtggagatttcagccgctttgaggtcaatggtagaataggaaatatcttcctatagaaactagacagaatgattctcagaaacttctttgtgatgtgtgcgttcaactcacagagtttaacctttcttttcatagggcagttaggaaacactctgtttgtaaagtctgcaagtggatattcagacctccttgaggccttcgttggaagcgggatttcttcatgttctgctagacagaagaattctcagtaacttccttgtgttgtgtgtattcaactgacagagttgaactttcatttagagagagcagatttgaaacactgtttttgtggaatttgcaagtggagatttcaaacgctttggggccaaaggcagaaaaggaaatatcttcgtatgaaaactagacagaatcattctcagaaactgctctgcgatgtgtgcgttcaactctcagagtttaacttttcttttcattcaacagtttgaaaacactctgtttgtaaagtctgcacgtggatattttgaccacttagaggccttcgttggaaacgggtttttttcttgtaaggctagacagaagaattctcagtaacttccttgtgttgtgtgtattcaactcacagagttgaacgatcctttacacagagcagacttgtaacactctttttgtggaatttgcaagtggagatttcagccgctttgaagtcaaatgtagaaaaggaaatatcttcctataaaaactagacataaggattctcagaaactcctttgtgatgtgtgcgttcaactcacagagtttaatctttctgttcatagagcagttaggaaacactctgtttgtaaagtctgcaagtggatattcagacctccttgaggccttcgttggaaacgggatttcttcatattctgctagacagaagaattctcagtaacttccttgtgttgtgtgtattcaactcacagagttgaacgatcctttacacagagcagacatgaaacactctctttgtggaatttgcaagtggagatttcagccgctttgaggtcaatagcagaaaaggaaatatcttcgtagaaaaactagacagaatgattctcagaatctcctttgtaatgtgtgcgttcaactcacagagtttaacctttcttttcatagagcagttaggaaacactctgtttgtaaagactgcaagtggatattcagacctctttgcggccttcgttggaaacgggatttcttcatattctgctagacagaagaattcccactaacttccttgtgttgtgtgtgttcaactcacagagttgaactttcatttacacagagcagatttgaaacactctttttgtggaatttgcaagtggagatttcaagcgctttgaggccaaaggcagaaaaggaaatatcttcgtttcaaaactatacagaatcattctcagaaacttctctgcgatgtgtgcgttcaactctcagagtttaacttttcttttcattcagcagtttggaaacactctgtttgtaaagtctgcacgtggatattttgaccacttagaggccttcgttggaaacgggtttttttcctgtaaggctagacagaagaattcccagtaacttccttgtgttgtgtacattcaactcacagagttgaacgttcccttagacagagcagatttgaaacactctttttgtgcaattggcaagtggtgatttcagcctctttgaggtcaatggtagaaaaggaaatatcttcgtataaaaactagatagaatgattctcagaaacttcattgtgatgtgtgtgttcaactcacagagtttaacctttcttttcatagagcagttgggaaacagtctgtttgtaaattctgtaagtggatattctgacatcttgtggccttcgttggaaacgggatttcttcatattctgctagacagaagagttctcagtaacttccttgtgttgtgtctattcaactcacagagttgaacgatcctttacacagagcagacttgaaacactctttttgtggaatttgcaagtggagatttcagccgctttgaggtcaatggtagaaaaggaaatatcttcgtataaagactagacagaatgattctcagaaactcctttgtgatgtgtgtgttcaactcacagtgtttaacctttcttttcatagagcagttagtaaacactctgtttataaagtctgcaagtggatattcagacccctttgaggccttcgttggaaacgggatttcttcatattatgctagacagaagaattctcagtaacttccttgtgttgtgtgtattcaactgacagagttgaacgttcatttagagagagcagatttgtaacactgtttttgtggaatttgcaagtggagatttcaagcgctttggggccaaaggcagaaaaggaaatatcttcgtataaaaactagacagaatcattctcagaaactgctctgcgatgtgtgcgtataactctcagagtttaacttttcttttcattcagcagtttggaaacactctgtttgtaaagtctgcacgtggataatttgaccacttagagaccttcgttggaaacgggtttttttcatgtaaggctagacagaagaattcccagtaacttccttgtgttgtgtacattcaactcacagagttgaacgttccctcagacagagcagatttgaaacactctttttgtgcaattggcaaatggatatttcaagcgctttaaggtcaatggcagaaaaggaaatatcttcgtttcaaaactagacagaatgattctcagaaactcctttgtggtgtgtgcgttcaactcacagagtttaacctttcttttcatagagcagttaggaaacactctgtttgtaaagtctgcaagtggatattcagacctctttgaggccttcgttggaaacgggatttcttcatattctgctagacagaagaattctcagtaacttccttgtgttgtgtgtattctactcacagagttgaacgatcctttacacagagcagacttgaaacactctttttgtggaatttgcaagtggagatttcagccgctttgaggtcaatagtagaaaaggaaatatcttcgtagaaaaactaggcagaatgattctcagaaactcctttgtgatgtgtgtgctcaactcacagagtttaacctttcttttcatagagcagttagtaaacactctgtttataaagtctgcaagtggatattcagacccctttgaggccttcgttggaaacgggatttcttcatattatgctagacagaagaattctcagtaacttccttgtgttgtgtgtattcaactcacagagtagaacgatcctttacacagagcagacttgaaacactctttttgtggaatttgcaagtggagatttcaagcgctttgaggccaaaggcagaaaaggaaatatcttcgtataaaaactagacagaatcattctcagaaactgctctgcgatctgtgcgttcaactctcagagtttaacttttcttttcattcagcagtttggaaacactctgtttgtaaagtctacacgtggatattttgaccacttagaggccttcgttggaaacgggtttttttcctgtaaggctagagagaagaattcccagtaacttccttgtgttgtgtacattcaactcacagagttgaacgttcccttagacagagcagatttgaaacactctttttgtgcaattggcaagtggtgatttcaaccgcttttaggtcaatggtagaaaaggaaatatcttcgtataaaaactagacagaatcattcccacaaactgcgttgtgatgtgttcgttcaactcacagagtttaacctttcttttcatagagcagttaggaaacactctgtttgtaaattctgtaagtggatattctgacatcttgtggccttcgttgcaaacgggatttcttcatattctgctagacagaagaattctcagtaacttccttgtgttgtgtgtattcaactcacagagttgaacgatggtttacacagagcagatttgaaacactctttttgtggaatttgcaagtggagatttcagccgctttgaggtcaatggtagaaaaggaaatatcttcgtataaaaactagacagaagcattctcaaaaactcctttgtgaggcttgtgttcaactcccagaggataacattgcttttcatagagcagttttgaaacattcttttcgttgagtctccaagtggacatttggagcgctttcaggcctgtggtggaaaaggaaatatcttcacataaaaactagagagaagaattctcagtaacttccttgtgttgtgtgtattcaactgacagagttgaactttcatttagagagagcagatttgaaacactgtttttgtggaatttgcaagtggagatttcaagcgctttggggccaaaggcagaaaaggaaatatcttcgtttaaaaactagacagaatcattctcagcaactgctgcgtgatgtgtgagttcaactctcagagtttaccttttcttttcattcagcggtttggaaacactctgtttgtaaagtctgcacgtggatattttgaccacttagaggccttcgttggaaactggattttttcatgtaaggctagacagaaaaattcccagtaacttccttgtgttgtgtgcattcaactcacagagttgaacgttcccttagacagagcagatttgaaacactctatttgtgcaatttgcaagtgtagatttcaagcgctttaaggtcaacggcagaaaaggaaatatcttcgttttaaaactagacagaatcattcccacaaactgcgttgtgatgtgttcgttcaactcacagagtttaacctttctgttcatagagcagttaggaaacactctgtttgtaaagtctgtaagtggatattctgacatcttgtggccttcgtttgaaaagggatttcttcatattctgctagacagaagaattctcagaaacttccttgtgttgtgtgttttcaactcacagagttgaacgatgctttacacagagtagacttgaaacactctttttgtgtaatttgcaagtggagatttcagccgctttgaggtcaatggtagaataggaaatatcttcctatagaaactagacagaatgattctcagaacctcctttgtgatgtgtgcgttcaactcacagagtttaacctttcttttcatagagcagttaggaaacactctgtttgtaaagtctgcaagtggatattcagacctccttgaggctttcgttggaaacgggatttcttcatattctgctagaaagaagaattcccagtaacttccttgtgttgtgtgtgttcaactcacagagttgaactttcatttacacagagcagatttgaaacactctttttgtggaatttgcaagtggagatttcaagcgctttgaggccaaaggcagaaaaggaaatatcttcgtataaaaaccagacagaatcattctcagaaactgctgcgtgatgtgtgcgtccaactctcagagtttaacttttcttttcattcagcggtttggaaacactctgtttgtaaagtctgcacgtggatattttgaccacttagaggccttcgttggaaacgggtttttttcatgtaaggctagacagaagaattcccagtaacttccttgtgttgtgtgcattcaactcacagagttgaacgttcccttagacagagcagatttgaaacactctatttgtgcaatttgcaagtgtagatttcaagcgctttaaggtcaatggcagaaaaggaaatatcttcgtttcaaaactagacagaatcattcccacaaactgcgttgtgatgtgttcgttcaactttcagagtttaacctttctgttcatagagcagttaggaaacactctgtttgtaaagtctgtaagtggatattctgacatcttgtggccttcgttggaaacgggatatcttcatattctgctagacagaataattctcagtaacttccttgtgttgtgtgtattcaactcacagagttgaacgatcctttacacagagcagacttgaaacactctttttgtggaatttgcaagtggagatttcagccgctttgaggtcaatggtagaaaaggaaactatcttcatataaagactagacagaatgattctcagaaactccgttgtgatgtgtgcgttcaactcacagagtttaacctttcttttcatagagcagttaggaaacactctgtttgtaaagtctgcaagtggatatccagacctctttgaggccttcattggaaacgggatttcttcatattctgctagacagaagaattctcagtaacttccttgtgttgtgtgtattcaactgacagagttgaactttcatttagagagagcagatttgaaacactgtttttgtggaatttgcaagtggagatttcaagcgctttggggccaaaggtagaaaaggaaatatcttcgtataaaaactagacagaatcattctcagaaactgctctgcgatgtgtgcgttcaactctcagagtttaactttgcttttcattcagcagtttggaaacactctgtttgtaaagtctgcacgtcgataatttgaccacttagaggccttcgttggaaacgggtttttttcatgtaaggctagacagaagaattcccagtaacttccttgtgttgtgtgcattcaactcacagagttgaacgttcccttagacagagcagatttgaaacactctatttgtgcaatttgcaagtgtagatttcaagcgctttaaggtcaatggcagaaaaggaaatatcttcgtttcaaaactagacagaatgattctcagaaactcctttgtgatgtgtgcgttcaactcacagagtttaacctttctgttcatagagcagttaggaaacactctgtttgtaaagtctgtaagtggatattctgacatcttgtggccttcgttggaaacgggatttcttcatattctgctagacagaagaattctcagtaacttccttgtgttgtgtgtattcaactcacagagttgaacgatcctttacacagagcggacttgaaacactcgttttgtggaatttgcaagaggagatttcagccgcgttgaggtcaatggtagaaaaggaaatatcttcgtataaaaactagacagaatgattctcagaaactcctttgtgatgtgtgcgttcaactcacagagtttaacctttcttttcatagagcagttaggaaacactctgtttgtaaagtctgcaagtggatattcagacctccttgaggccttcgttggaaacgtgatttcttcatattctgctagacagaagaattcccagtaacttccttgtgttgtgtgtgttcaactcacagagttgaactttcatttacccagagcagatttgaaacactctttttgtggaatttgcaagtggagatttcaagcgctttgaggccaaaggcagaaaaggaaatatcttcgtataaaaactagacagaatcattctcagaaactgctgcgtgatgtgtgcgttcaactctcagagtttaacttttcttttcattcagcggtttggaaacactctgtttgtaaagtctgcacgtggaaattttgaccacttagaggccttcgttggaaacgggttttttcatttaaggctagacagaagaattcccagtaacttccttgtgttgtgtgcattcaactcacagagttgaacgttcccctagacagagcagatttgaaacactctatttgtgcaatttgcaagtgtagttttcaagctcttttaggtcaacggcagaaaaggaaatatcttggtttcaaaactagacagaatcattcccacaaactgcgttgtgatgtgttcgttcaactcacagtgtttaacctttcttttcatagagcagttaggaaacagtctgtttgtaaattctgtaagtggatattcagacctctttgaggccttcgttggcaacgggatttctccatactgtgctagacagaagaattctcagtaacttccttgtgttgtgtgtattcaactcacagagttgaacgatcctttacacagagcagagttgaaacactctttttgtggaatttgcaagtggagatttcagccgctttgaggtcaatggtagaataggaaatatcttcatacagaaactagacagaatgattctcagaaacttctttgtgatgtgtgcgttcaactcacagagtttaacctttcttttcatagagcagttaggaaacactctgtttgtaaactctgcaagtggatactcagacctctttgaggccttcgttggaaacgggatttctccatactgtgatagacagaagaaatcccattaacttccttgtgttgtgtgtgttcaactcacagagttgaactttcatttacacagagcagatttgaaacactctttttgtggaatttgcaagtggagatttcaagcgctttgaggccaaaggcagaaaaggaaatatcttcgtttcaaaactagacagaatcattctcagaaactgctctgcgatgtgtgcgttcaactctcagagtttaactttgcttttcattcagcagtttggaaacactctgtttgtaaagtctgcacgtggataatttgaccacttagaggccttcgttggaaacgggtttttttcatataaggctagacagaagaattcccagtaacttccttgtgttgtgtacattcaactcacagagttgaacgttcccttagacagagcagatttgaaacactctttttgtgcaattggcaaatggagatttcaagcgctttaaggtcaatggcagaaaaggaaatatcttcgtttcaaaactagacaggatcattcccacaaactgcgttgtgatgtgttcgttcaactcacagagtttaacctttcttttcatagagcagttaggaaacagtctgtttgtcaattctgtaagtggatattctgacatcttgtggccttagttggaaacgggatttcttcatattctgctagacagaagaattctcagtaacttcttggtgttgtgtgtattcaactcacagagttgaacgatgctttacacagagcagacttgaaacactcgttttgtggaatttgcaagttgagatttcagccgctttgaggtcaatggtagaaaaggaaatatcttcgtataaaaactagacagaatgattctcagaaactcctttgtgatgtgtgtgttcaactcacagagttaaacctttcttttcatagagcagttaggaaacactctgtttgtaaagtctgcaagtggatattcagacctctttgaggccttcgttggaaacgggtttttttcatataaggctagacagaagaattcccagtaacttccttgtgttgtgtgtgttcaactcacagagttgaactttcatttacacagagcagatttgaaacactctttttgtgggatttgcaggtggagatttcaagcgctttgaggccaaaggcagaaaaggaaatatcttcgtataaaaactagacagactcattctcagaaactgctctgcgatgtgtgcgttcaactctcagagtttaacttttcttttcattcagcagtttggaaacactctgtttgtaaagtctgcacgtggatattttgaccacttagaggccttcgttggaaacggttttctttcctgtaaggctagacagaagaattcccagtaacttccttgtgttgtgtacattcaactcacagagttgaacgttcccttagacagagcagatttgaaacactctttttgtgcaattggcaagtggagatttcaagcgctttaaggtcaatggcagaaaaggaaatatcttcgtttcaaaactagacagaatcattcccacaaactgcgttgtgatgtgttcgttcaactcacagagtttaacctttcttttcatagagcagttaggaaacactctgtttgtaaagtctacaagtggatattcagacctctttgaggccttcgttggaaacgggtttttttcatataaggctagacagaagaattctcagtaacttccttgtgttgtgtgtattcaactcacagagttgaacgatcctttacacagagcagacttgaaacactttttttgtggaatttgcaagtggagatttcagccgctttgaggtcaatagtagaaaaggaaatagcttcgtagaaaaactagacagaattgttctcagaaactcctttgtgatgtgtgcgttcaactcacagagtttaacctttcttttcatagagcagttaggaaacactctgtttgtaaagtctggaagtggatattcagacctccttgaggccttcgttggaaacgggatttcttcatattatgcttgacagaagaattctcagtaacttccttgtgttgtgtgtattcaactgacagagttgaactttcatttagagagagcagatttgaagcactgtttttgtggaatttgcaagtggagacttcaagcgctttgggccaaaggcagaaaaggaaataccttcgtataaaaactagacagaatcattctcagaaactgctgcgtgatgtgtgctttcaactctcagagtttaacttttcttttcattcagcggtttggaaacactctgtttgtaaagtctgcacgtggaaattttgaccacttagaggccttcgttggaaacgggtttttttcatgtaaggccagacagaagaattctcagtaacttcccttgtgttgtgtgtattcaactgacagagttgaactttcatttagagagagcagatttgaaacactgtttttgtggaatttgcaagtggagatttcaagcgttttggggccaaaggcagaaaaggaaatatcttcgtataaaaactaggcagaatcattctcagaaactgctctgcgatgtgtgtgttcaactctcagagtttaacttttcttttcattcagcagtttggaaacactctgtttgtaaagtctgcacgtggataattggaccacttagaggccttcgttggaaacgggtttttttcatgtaaggctatacagaagaattctcagtaacttccttgtgttgtgtgtattcaactcacagagttgaacgatcctttacacagagcagacttgtaacactctttttgtggaatttgcaagtggagatttcagccgctttgaagtcaaaggtagaaaaggaaatatcttcttataaaaactagacagaatgattctcagaaactcctttgtgatgtgagcgttcaactcacagagtttaacctttcttttcatagagcagttaggaaacactctgcttgtaaagtctgcaagtggatattcagccctctttgaggccttcgttggaaacgggtttttttcatatagggctagacagaagaattctcagtaacttccttgtgttgtgtgtattcaactgacagagttgaactttcatttagagagagcagatttgcaacactgtttttgtggaatttgcaagtggagatttcaagcgctttggggccaaaggcagaaaaggaaatatcttcggataaaaactagacagaatcattctcagaaactgctctgcgatgtgtgcgttcaactctaagagtttaacttttcttttcattcagcagtttggaaacactctgtttgtaaagtctgtacgtggataatttgaccacttagaggccttcgttggaaacgggtttttttcatgtaaggatagacagaagaattcccagtaacttccttgtgttgtgtgcattcaactcacagagttgaacgttcccttagacagagcagatttgaaacactctatttgtgcaatttgcaagtgtagttttcaagctctttaaggtcaacggcagaaaaggaaatatcttggtttcaaaactagacagaatgattctcataaactcctttgtgatgtgtgcgttcaactcacagagtttaacctttcttttcatagagcagttaggaaacactctgtttgtaaagtctgtaagtggatattctgacatcttgtggccttcgttggaaacgggatttcttcatattctgctagacagaagaattctcagtaactttcttgtgttgtgtgtattcaactcacagagttgaacgatcctttacagagagcagacttgaaacactctttttgtggaatttgcaagtggagatttcagccgctttgaggtctatggtagaaaaggaaatgtcttcgtataaagactagacagaatgattctcagaaactcctttgtgatgtgtgtgttcaactcacagagtttaacctttcttttcatagagcagttaggaaacactctgtttgtaaagtctgcaagtggatattcagacctctttgaggccttcattggaaacgggtttttttcatagaaggctagacagaagaattcccagtaacttccttgtgttgtgtgtgttcaactcacagagttgaactttcatttacacagagcagatttgaaacactctttttctggaatttgcaagtggagatttcaagcgctttgaggccaaaggcagaaaaggaaatatcttcgtataaaaactagacagaatcattctcagaaactgctctgcgatgtgtgcgttcaactctcagagtttaactttgcttttcattcagcagtttggaaacactctgtttgtaaagtctgcacgtggataatttgaccacttagaggccttcgttggaaacgggtttttttcatgtaaggctagacagaagaattctcagtaacttccttgtgttgtgtgtattcaactcacacagttgaccgatcctttacacagagcagacttgtaacactctttttgtggaatttgcaagtggagatttctgccgctttgaagtcaaaggtagaaaagggaatatcttcctataaaaactagacagaatgattctcagaaactcctttgtgatgtgtgcgttcaactcacagagtttaacctttctgttcatagagctgttaggaaacactctgtttgtaaagtctgcaagtggatattcagacctccttgaggacttcgttggaaacgggatttcttcatattctgctagacagaagaattctcaataacttccttgtgttgtgtgcattcaactcacagagttgaatgatcctttacacagagcagattagaaacactctttttgtggaatttgcaagtggacatttcagccgctttgaggtcaatggtagaaaaggaaatatcttcgtataaaaactagacagaatgattctcagaaactcctttgtgatgtgtgcgttcaactcacagagtttaacctttcttttcatagagcagttaggaaacactctgtttgtaaactctgcaagtggatattcagacctctttgaggccttcgttggaaacgggtttttttcatataaggctagacagaagaattctcagtaacttccttgtgttgtgtgtattcaactgacagagttgaactttcatttagagagagcagatttgaaacactgtttttgtggaatttgcaagtggagatttcaagcgctttggggccaaaggcagaaaaggaaatatcttctgtataaaaactagacagaatcattctcagaaactgctctgcgatgtgtgcgttcaactctcagagtttaacttttcttttcattcagcagtttggaaacactctgtttgtaaagtctgcacgtggatattttgaccacttagaggccttcgttggaaacgggtttttttcctgtaaggctagacagtagaattcccagtaacctccttgtgttgtgtgcattcaactcacagagttgaacgtttccttagacagagcagatttgaaacactctatttgtgcaatttgcaagtgtagatttcaagcgctttaaggtcaatggcagaaaaggaaatatcttcgtttcaaaactagacagaatgattctcataaactcctttgtgatgtgtgcgttcaactcacagagtttaacctttcttttcatagagcagttaggaaacactgtgtttgtaaagtctgcatgtggatattcagacctccttgaggccttcgttggaaacgggaattcctcatattctgctagacagaagaattctcagtaacttccttgtgttgtgtttattcaactcacagagttgaatgatcctttacacagagcagacttgaaacactctttttgtggaatttgcaagtggagatttcagccgctttgaggtcaatggtagaaaaggaaactatcttcatataaagactagacagaatgattctcagaaactcctttgtgatgtgtgcgttcaactcacagcagtttaacctttcttttcatagagcagttaggaaacactctgtttgtaaagtctgcaagtggatattcagacctccttgaggccttcgttggaaacgggtttttttcatataaggctagacagaagaattctcagtaacttccttgtgttgtgtgtattcaactgacagagttgaactttcatttagacagagtagatttgaaacactctttttgtggaatttgcaagtggagatttcaagcgctttgaggccaaaggcagaaaaggaaatatcttcgtataaaaactagacagaatcattctcagaaactgctgcgtgatgtgtgcgttcaactctcagagtttaacttttcttttcattcagcggtttggaaacactctgtgaagtctgcacgtggatattttgaccacttagaggccttcgttggaaacgggtttttttcaagtaaggctagacagaagaattcccagtaacttccttgtgttgtgtgcattcaactcacagagttgaacgttcccttagacagagcagatttgaaacactctatttgtgcaatttgcaagtgtagatttcaagcgctttaaggtcaatggcagaaaaggaaatatctttgtttcaaaactagacagaatcattcccacaaactgcgttatgatgtgttcgttcaactcacagagtttaacctttctgttcatagagcagtgaggaaacactctgtttgtaaagtctgtaagtggatattctgacatcttgtggccttcgttggaaaagggatttcttcctattctgctagacagaagaattctcagtaacttccttgtgttgtgtgtattcaactcacagaattgaacgatcctttacacagagcagacttgaaacactctttttgtggaatttgcaagtggagatttcagccgcgttgaggtcaatggtagaaaaggaaatatcttcgtataaaaactagacagaatgattctcagaaactcctttgtgatgtgtgcgttcaactcacagagttcaacctttcttttcatagagcagttaggaaacactctgtttgtaaagtctgcaagtggatattcagacttctttgaggccttcgttggaagcgggttttcttcatattctgctagaaagaagaattctcactaacttccttgtgttgtgtttattcaactcacagagttgaatgatcctttacacagagcagacttgaaacactctttttgtggaatttgcaagtggagatttcagccgctttgaggtcaatggtagaaaagtaaatatcttcgtataaagactagacagaatgattctcagaaactcctttgtgatgtgtgcgttcaactcacagagtttaacctttctgttcatagagcagttaggaaacactctgtttctaaagtctgcaagtggatattcagacctccttgaggccttcgttggaaacgggatttcttcatattctgctagacagaagaattcccagtaacttccttgtgttgtgtgcattcaactcacagagttgaacgttcccttagacagagcagatttgaaacactctatttgtgcaatttgcaagtgtagatttcaagcgctttaaggtcaacggcagaaaaggaaatatcttcgtttcaaaactatacagaatgattctcagaaaatcttttgtgatgtgtgcgttcaactcacagagtttaacttttcttctcatagaccagttaggaaacactctgtttgtaaagtgtgcaagtggatattcagacctctttgaggccttcgttggaaacgggatttcttcatattctgctagacagaagaattctcagtaacttccttgtgttgtgtgtattcaactcacagagttgaaggatcctttacagagagcaggcttcaaacactctttttgtcgaatttgcaagtggagatttcagccgctttgaggtcaatggtagaataggaaatatcttcttatagaaactagacagaatgattctcagaaacttctttgtgatgtgtgcgttcaactcacagggtttaacctttcttttcatagagcagttaggaaacactctgtttgtaaactctgcaagtggatattcagacctctttgaggccttcgttggaaacgggatttcttcatactgtgctagacagaagaattcccagtaacttccttgtgttgtgtgtgttcaactcacagagttgaactttcatttacacagagcagatttgaaacactctttttgtggaatttgcaagtggagatttcaagcgctttgaggccaaaggcagaaaaggaaatatcttcctataaaaactagacagaatcattctcagaaactgctgcgtgatgtgtgcgttcaactctcagagtttaacttttcttttcattcagcggtttggaaacactctgtttgtaaagtctgcacgtggatattatgaccatttagaggccttcgttggaaacgggttttcttcatgtaaggctagacagaagaattcccagtaacttccttgtgttgtgtgcattcaactcacagagttgaacgttcccttagacagagcagatttgaaacactctatttgtccaatttgcaagtgtagatttcaagcgctttaaggtcaacggcagaaaaggaaatatcttcgtttcaaaactagacagaatgattctcagaaactcctttgtgatgtgtgctttcaactcacagagtttaacctttcttttcatagagcagttaggaaacactctgtgtataaagtctgcaagtggatattcaggcctctttgaggccttcgttggaaacgggatttcttcatatgatgctggacagaagaaatctcagtaacttccttgtgttgtgtgtattcaactcacagagttgaacggtcctttacacagagcagatttgaaacaatgtttttgtggaatttgcaagtggagatttcagccgctttgaggtcaatcgcagaaaaggaaatatcttcttatagaaactagacagaatgattctcagaaactcctttgtgatgtgtgcgttcaactcacagagttcaacctttcttttcatagagcagttaggaaacactctgtttataaactctgcaagtggatattcagacctctttgaggccttcgttggaaacgggatttcttcatattctgctagacagaagaattcccagtaacttccttgtgttgtgtgtgttcaactcacagagttgaactttcatttacacagagcagatttgaaacactctttttgttgaatttgcaagtggagatttcaagcgctttgaggccaaaggcagaaaaggaaatatcttcgtttcaaaactagacagaatcattctcaggaaactgctctgcgatgtgtgcattcaactctcagagtttaacttttcttttcattcagcagtttggaaacactctgtttgtaaagtctgcacgtggatattttgaccacttacaggccttcgttggaaacgggtttttttcctgtaaggctagacagaagaattcccagtaacttccttgtgttgtgtgcattcaactcacagaattgaacgttcccttagacagagcagatttgaaacactctatttgtgcaatttgcaagtgtagatttcaagcgctttaaggtcaacggcagaaaaggaaatatcttcgtttcaaaactagacagaatgattctcagaaactcctttgtgatgtgtgccgttcaactcacagagtttaacctttcttttcatagagcagttaggaaacactctgtttgtaaagtctgcaagtggatattcagacctccttgaggccttcgttggaaacgggttttcttcatattatgctagacagaagaattctcagtaacttccttgtgttgtgtgtattcaactcacagtgttgaacgatcctttacacagagcatacttgaaacactcttgttgtggaatttgcaagtggagatttcagccgctttgaggtcaatggtagaataggaaatatcttcctatagaaactagacagaatgattctcagaaactcctttgtgatgtgtgcgttcaactcacagagttcaacctttcttttcatagagcagttgggaaacactctgtttgtaaagtctgcaagtggatattcagacttatttgaggccttagttggaagcgggatttcttcatgttctgctagacagaagaattcccagtaacttccttgtgttgtgtgtgttcaactcacagagttgaactttcatttacccagagcagatttgaaacactctttttgtggaatttgcaagtggagatttcaagcgctttgaggccaaaggcagaaaaggaaatatcttcgtataaaaactagacagaatcattctcagaaactgctctgcgatgtgtgcgttcaactctcagagtttaacttttcttttcgttcagcagtttggaaacactctgtttgtaaagtctgcacgtggataatttgaccacttagaggccttcgttggaaacgggtttttttcatgtaaggctagacagaataattcccagtaacttccttgtgttgtgtacattcaactcacagagttgaacgttcccttaaacagagcagatttgaaacactctttttgtgcaattggcaagtggagatttcaagcgctttgaggtcaatggcagaaaaggaaatatcttcgtttcaaaactagacagaatcattcccaaaaactgcgttgtgatgtgttcgttcatctcacagagtttaacctttcttttcatagagcagttaggaaacactctgtttgtaaattctgtaagtggatattctgacatcttgtggccttcgttggaaacgggatttcttcatattctgctagacagaagaattctcagaaacttccttgtgttgtgtgtattcaactcacagagttgaacgatcgtttacacagagcagacttgaaacactctttttgtggaatttgtaagtggagatctcagccgctttgaggtcaatggtagaaaaggaaatatcttcatataaaaactagacagaatgattctcagaaactcctttgtgatgtgtgcgttcaactaacagagtttaacctttcttttcatagagcagttaggaaacactctgtttgtaaagtctgcaagtggatattcagacctctttgaggccttcgttggaaacgggttttttcatataaggctagacagaagaattctcagtaacgtccttgtgttgtgtgtattcaactgacagagttgaactttcatttagagagagcagatttgaaacactgtttttgtggaatttgcaagtggagatttcaagcgctttggggccaaaggcagaaaaggaaatatcttcgtataaaaactagacagaatcattctcagaaactgctctgcgatgggtgcgttcaactctcagagtttaacttttcttttcattcagcagtttggaaacactctgtttgtaaagtctgcacgtggatattttgaccacttagaggccttcgttggaaacgggtttttttcctgtaaggctagacagaagaattcccagtaacttccttgtgttgtgtacattcaactcacagagttgaacgttcccttagacagagcagatttgaaacactctttttgtgcaattggcaaatggagatttcaagcgctttaaggtcaatggcagaaaaggaaatatcttcgtttcaaaactagacagaatgattctcagaaactcctttgtgatgtgtgcgttcaactcacagagtttaacctttcttttcatagagcagttaggaaacactgtttgtaaagtctgcaagtggatattcagacctctctgaggccttcgttggaaacgggatttcttcatactgtgctagacagaagaattctcagtaacttccttgtgttgtgtgtattcaactcacagagttgaacgatcctttacacagagcggacttgaaacacactttttgtggaatttgcaagtggagatttcagccgcattgaggtcaatggtagaaaaggaaatatcttcatataaaaaatagacagaatgattctcagaaactcctttgtgatgtgtgttttcaactcacagagtttaacctttcttttcatagagcagttagtaaacactctgtttataaagtctgcaagtggatattcagacccctttgaggccttcgttggaaacgggatttcttcatattatgctagacagaagaattctcagtaacttccttgtgttgtgtgtattcaactgacagagttgaacttgcatttagagagagcagatttgaaacactctttttgtggaatttgcaagtggagatttcaagcgctttggggccaaaggcagaaaaggaaatatcttcgtataaaaactagacagaatcattctcagaaactgctgcgttatgtgtgcgttcaactctcagagtttaacttttcttttcattcagcggtttggaaacactctgtttgtaaagtctgcacgtggatattttgaccacttagaggccttcgttggaaacgggtttttttcatgtaaggctagacagaagaattcccagtaacttccttgtgttgtgtacattcaactcacagagttgaacgttcccttagacagagcagatttgaaacactctttttgtgcaattggcaaatggagatttcaagcgctttaaggtcaatggcagaaaaggaaatatcttcgtttcaaaactagacagaatcattcccacaaactgcgttgtgatgtgttcgttcaactcacagagtttaacctttctgttcatagagcagttaggaaacactctgtttgtaaagtctgcaagtggatattcagacctccttgaggccttcgttggaaacgggatttcttcatattctgctagacagaagaattctcagtaacttccttgtgttgtgtttattcaactcacagagttgaatgatcctttacacagagcagacttgaaacactctttttgtggaatttgcaagtggagatttcagccgctttgaggtcaatggtagaaaagtaaatattttcgtataaagactagacagaatgattctcagaaactcctttgtgatgtgtacgttcaactcacagagtttaacctttcttttcatagagaagttaggaaacactctgtttgtaaagtctgcaagtggatattcagacctctttgaggccttcgttggaaacgtgttttttacatataagtctagacagaagaattcccagtaacttccttgtgttgtgtgtgttcaactcacagagttgaactttgatttacacagagcagatttgaaacactctttttgtggaatttgcaggtggagatttcaagcgctttgaggccaaaggcagaaaaggaaatattcttcgtataaaaactagacagaatcattctcagaaactgctgcgtgatgtgtgcgttcaactctcagagtttaaattttcttttcattcagcggtttggaaacactctgtttgtaaagtctgcacgtggatattttgaccacttagaggccttcgttggaaacgggttttttgcatgtaaggctagacagaagaattcccagtaacttccttgtgttgtgtgcattgaactcacagagttgaacgttcccttagagagggcagatttgaaacactctatttgtgcaatttgcaagtgtagatttcaagcgctttaaggtcaacggcagaaaaggaaatatcttcgtttcaaaactagacagaatcattcccacaaactgtgctgtgatgtgttcgttcaactcacagagtttaacctttctgttcatagagcagttaggaaacactctgtttgtaaagtctgcaagtggatattcagacctccttgaggccttcgttggaaacgggatttcttcatattctgctagacagaagaattctcagtaacttcccttgtgttgtgtgtattcaactcacagagttgaacgatcctttacacagagcagacttgtaacactctttttgtggaatttgcaagtggagatttcagccgctttgaagtcaaaggtagaaaaggaaatatcttcctataaaaactagacagaatgattctcataaactcctttgtgatgtgtgcattcaactcacagagtttaacctttcttttcatagagcagttaggaaacactctgtttgtaaagtctgcaagtggatattcagacctccttgaggccttcgttggaaaagggatttcttcatattctgctagacagaagaattcgcagtaacttccttgtgttgtgtgtgttcaactcacagagttgaactttcatttacacagagcagatttgaaacactctttttgtggaatttgcaggtggagatttcaagcgctttgaggccaaaggcagaaaaggaaatatcttcgtataaaaactagacagaatcattctcagaaactgctctgcgatgtgtgcgttcaactctcagagtttaacttttcttttcattcagcagtttggaaaaactctgtttgtaacgtctgcacgtgcataatttgaccacttagaggccttcgttggaaacgggtttttttcctgtaaggctagacagaagatttctcagtaacttccttgtgttgtgtgtattcaactcacagagttgaaagatcctttacacagagcagactggtaacactctttttgtggaatttgcaagtggagatttcagccgctttgaagtcaaaggtagaaaaggaaataacttcctataaaaactagacagaatcattcccacaaactgcgttgtgatgtgttcgttcaactcacagagtttaacctttctgttcatagagcagttaggaaacactctgtttgtaaagtctgccagtggatattcagacctccatgaggccttcgttggaaacgggatttcttcatattctgctagacagaagaattctcagaatcttccttgtgttgtgtgtattcaactcacagagttgaaccatcctttacacagagcagacttgaaacactctttttgtggaatttgcaagtggagatttcagccgctttgaggtccatggtagaaaaggaaatatcttcgtataaaaactagacagaatgattctcagaaacttctttgtgatgtgtgcgttcaagtcacagagtttaacctttcttttcatagagcagttaggaaacactctgtttgtaaactctgcaagtggatgttcagacctgtttgaggccttcgttggaaacgggatttcttcatactatgctagacagaagaattcccagtaacttccttgtgttgtgtgagttcaactcacagagttgaactttcatttacacagagcagatttgaaacactctttttgtggaatttgcaagtggagatttcaagcgctttgacgccaaaggcagaaaaggaaatatcttcgtataaaaattagacagaatcattctcagaaactgctctgtgatgtctgcgttcaactctcagagtttaacttttcttttcattcagcagtttggaaacactctgtttgtaaagtctgcacgtggatattttgaccacttagaggtcttcgttggaaacgggtttttttcatgtaaggctagacagaagaattcccagtaacttccttgtgttgtgtacattcaactcacagagttgaacgttcccttagacagagtagatttgaaacactctttttgtgcaattggcaagtggagatttcaagcgctttaaggtcaatggcagaaaaggaaatatcttcgtttcaaaactagacagaatcattcccacaaactgcgttgtgatgtgttcgttcaactcacagagtttaacctttcttttcatagagcagttaggaaacagtctgtttgtaaattctgtaagtggatattctgacatcttgtggcctttgttggaaacgggatttcttcatattctgctagacagaagaattctcagaatcttccttgtgttgtgtgtattcaactcacagagttgaacgatcctttacacagagcagacttgaaacactctttttgtggaatttgcaagtggagatttcaagcgctttgaggccaaaggcagaaaaggaaatatcttcgtataaaaactagacagaatgattctcagaatcttctttgtgatgtgtgcgttcaactcacagagtttaacctttcttttcatagagcagttaggaaacactctgtttgtaaactctgcaagtggatattcagacctcattgaggccttcgttggaaacgggatttcttcatactatgctagacagaagaattctcagtaacttccttgtgttgtgtgtattcaactcacagagttgaacgaccctttacacagagcggacttgaaacactctttttgtggaatttgcaagtggagatttcagccgcgttgaggtcaatggtagaaaaggaaatatcttcgtatagaaactagacagaatcattctcagaaactgctctgcgatgtgtgcgttcaactctcagagtttaacttttcttttcattcagcagtttggaaacactctgtttctaaagtctgcacgtggatattttgaccacttagaggccttcgttggaaacgggtttttttcctgtaaggctagacagaagaattcccagtaacttccttgtgttgtgtacattcaactcacagagttgaacgttcccttagacagagcagatttgaaacactctttttgtgcaattggcaaatggagatttcaagggctttaaggtcaatggcagaaaaggaaatatcttcgtttcaaaactagacagaatcattcccacaaactgcgttgtgatgtgttcgttcaactcacagagtttaacctttctgttcatagagcagttaggaaacactctgtttgtaaagtctgtaagtggatattctgacatcttgtggccttcgttgggaacgggatttcttcatattctgctagacagaagaattctcagtaacttcccttgtgttgtgtgtattcaactcacagagttgaacgatcctttacacagagcagacttgaaacattctttttgtggaatttgcaagtggagatttcagccgctttgaggtcaatggtagaataggaaatatcttcatatagaaactagacagaatgattctcagaaactcctttgtgatgtgtgcgttcaactcacagagtttaacctttctgttcatagagctgttaggaaacactctgtttgtaaagtctgcaagtggatattcagacctccttgaggccttcgttggaaacgggatttcttcatattctgctagacagaagaattctcagtaacttccttgtgttgtgtgtattcaactcacagagttgaacgatcctttacagagagcagacttgaaacactctttttgtggaatttgcaagtggatatttcagccgctttgaggtcaatggtagaaaaggaaatatcttcgtataaagactagacagaatcattctcagaaactgctctgcgatgtgtgcgttcaactctcagagtttaacttttcttttcattcagcagtttggaaacactctgtttgtaaagtctgcacgtgaataatttgaccacttagaggccttcgttggaaacgggtttttttcatgtaaggctagacagaagaattcccagtaacttccttgtgttgtgtacattcaactcacagagttgaacgttcccttagacagagcagatttgaaacactctttttgtgcaattggcaagtggagatttcaagcgatttgaggtcaatggcagaaaaggaaatatcttcgtttcaaaactagacagaatcattcccacaaaatgcgttgtgatgtgttcgttcatctcacagagtttaacctttcttttcgtagagcagttaggaaacagtctgtttgtaaattctgtaagtggatattctgacatcctgtggccttcgttggaaacgggatttcttcatattctgctagacagaagaattctcagtaacttccttgtgttgtgtgtattcaactcacagagttgaacgatcctttacacagagcagacttgaaacactctttttgtgaaatttgcaagtggagatttcagccgctgtgagttcaatggtagaataggaaatatcttcctatagaaactagacagaatgattctcagaaactcctttgtgatgtgtgcgttcaactcacagagtttaacctttctgttcatagagctggtaggaaacactctgtttgtaaagtctgcaagtggatattcagacctccttgcggccttcgttggaaacgggatttcttcatattctgctagacagaagaattctcagtaacttctttgtgttgtgtgtattcaactcacagagttgaacgatcctttacacagagcagacttgaaacactctttttgtggaatttgcaagtggagatttcagccgctttgaggtcaatggtagaaaaggaaatatcttcgtataaagactagacagaatcattctcagaaactgctctgcgatgtgtgcgttcaactctcagagtttaacttttcttttctttcagcagtttggaaacactctgtttgtaaagtctgcacgtggatattttgaccacttagaggccttcgttggaaacgggtttttttcctgtaaggctagacagaagaattcccagtaacttccttgtgttgtgtacattcaactcacagagttgaacgttcccttagacagagcagatttgaaacactctttttgtgcaattggcaagtggagatttcaagcgctttgaggtcaatggcagaaaaggaaatatcttcgtttcaaaactagacagaatgattctcataaactcctttgtgatgtgtgcgttcaactcacagagtttaacctttcttttcatagagcagttaggaaacactctgtttgtaaagtatgcaagtggatattcagacctctttcaggccttcgttggaaacgggatttcttcatattatgctagacagaataattctcagtaacttccttgtgttgtgtgtattcaactcacagagttgaacgatcctttacagagagcagacttgtaacactctttttgtggaatttgcaagtggagatttcagccgctttgaggtcaatggtagaataggaaatatcttcctatagaaagtagacagaatgattctcataaactcctttgtgatgtgtgcattcaactcacagagtttcacctttcttttcatagagcagttaggaaacactctgtttgtaaagtctgcaagtggatattcagaccaccttgaggccttcgttggaaacgggatttcttcatattctgctagacagaagaaatcccagtaacttccatgtgttgtgtgtgttcaactcacagagttgaactttcatttacacagagcagatttgaaacactctttttgtggaatttgcaaatggagatttcaaactctttgaggccaaaggcagaaaaggaaatatcttcgtataaaaactagacagaatcattctcagaaactgctgcgtgatgtgtgcgttcaactctcagagtttaacttttgttttcattcagcggtttggaaacacactgtttgtaaagtctgcacgaggatatattgaccacttagaggccttcgttggaaacgggtttttttcatgtaaagctagacagaagaattcccagtaactttccttgtgttgtgtgcattcaactcacagagttgaacgttcccttagacagagcagatttgaaacacactatttgtgcaatttgcaagtgtagatttcaagcgctttaaggtcaatggcagaaaaggaaatatcttcgtttcaaaactagacagaatcattcccacaaactgcgttgtgatgtgttcgttcaactcacagagtttaacctttcttttcatagagcagttaggaaacagtctgtttgaaaattctgtaagtggatattctgacatcttgtggccttcgttggaaacgggatttcttcatattctgctagacagaagaattctcagtaacttccttgtgttgtgtgtattcaactcacagagttgaacgatcctttacacagagcagacttgaaacattctttttgtggaatttgcaagtggagatttcagacgctttgaggtcaatggtagaataggaaatatcttcctatagaaactagacagaacgattctcagaaactcctttgtgatgtgtgcgttcaactcacagagtttaacctttcttttcatagagcagttaagaaacactctgtttgtaaagtctgcaagtggatattcagacctctttgaggccttcgttggaaacgggatttcttcatattctgctagacagaagaattctcagtaacttccttgtgttgtgtgtattcaagtgacagagttgaactttcatttagagagagcagatttgaaacactgtttttgtggaatttgcaattggagatttcaagcgctttggggccaaaggcagaaaaggaaatatcttcgtataaaaactagacagaatcattctcagaaactgctgcgtgatgtgtgcgttcaactctcagagtttaacttttcttttcattcagcggtttggaaacactctctttgtaaagtctgcacgtggatattttgacctcttagaggccttcgttggaaacgggttttttttcatgtaaggctagacagaagaattcccagtaacttccttgtgttgtgtgcattcaactcacagagttgaatgttcccttagacagagcagatttgaaacactctatttgtgcaatttgcaagtgtagatttcaagcgctttaaggtcaatggcagaaaaggaaatatcttcgtctcaaaactagacagaatcattcccagaaactgcgttgtcatgtgttcgttcaactcacagagtttaacctttctgttcatagagcagttaggaaacactctgtttgtaaagtctgtaagtggatattctgacatcttgtggccttcgttggaaacgggatttcttcatattctgctagacagaagaattctcagtaacttccttgtgttgtgtgtattcaactcacagagttgaacgatcctttacacagagcagacttgaaacactctttttgtggaatttgcaagtggagatttcagccgctttgagatcaatggtagaaaaggaaatatcttcgtataaagactagacagaatgattctcagaaactccttttggatgtgtgcgttcaactcacagagtttaacctttcttttcatagagcagttaggaaacactctgtttgtaaagtctgcaagtggatattcagacctctttgaggccttcgttggaaaagggatttcttcattttatgctagacagaagaattctcagtaacttccttgtgttgtgtgtattcaactgacagagttgaactttcatttggagagagcagatttgaaacactgtttttgtggaatttgcaagtggagatttcaagcgctttgggaccaaaggcagaaaaggaaatatcttcgtataaaaactagacagaataattctcagaaactgctgcgtgatgtgtgcgttcaactctcagagtttaacttttcttttcattcagcggtttcgaaacactctgtaaagtctgcacgtggatattttgaccacttagaggccttcgttggaaacgggtttttttcatgtaaggctagacagaagaattcccagtaacttccttgtgttgtgtgcattcaactcacagagttgaacgttcccttagacagagcagatttgaaacactctatttgtccaatttgcaagtgtagatttcaagcgctttaaggtcaacggcagaaaaggaaatatcttcgtttcaaaactagacagaatcattcccacaaactgcgttgtgatgtgttcgttcaactcacagactttaacctttctgttcatagagcagttaggaaacactctgtttgtaaagtctgcaagtggatattcagacctccttgaggccttcgttggaaacgggatttcttcatattctgctagacagaagaattctcagaaacttccttgtgttgtgtaatttcaactcacagagttgaacgatgctttacacagagtagacttgaaacactctttttgtggaatttgcaagtggagatttcagccgctttgaggtcaatttttgaaaaggaaatatcttcgtataaaaactagacagaatgattctcagaaactcctttgtgatgtgtgtgttcaactcacagactttaacctttcttttcatagagcagttaggaaacactctgtttgtacagtctgcaagtggatattcagacatccttgaggctttcgttgaaaacgggatttcttcatattctgctagaaagaagaaattcccagtaacttccttgtgttgtgtgtgttcaactcacagcagttgaactttcatttacacagagcagattggaaacactctttttgtggaatttgcaaggggagatttcaagcgctttgaggccaaaggcagaaaaggaaatatcttcgtataaaaactagacagaatcattctcagaaactgctctgcgatgtgtgcgttcaactctcagagtttaacttttcttttcattcagcagtttggaaacactctgtttgtaaagtctgcacgtggatattttgaccacttagaggccttcgttggaaacggtttttttcctgtaaggctagacagaagaattcccagtaacttccttgtgttgtgtacattcaactcacagagttgaacgttcccttagacagagcagatttgaaacactctttttgtgcaattggcaagtggtgatttcagcctctttgaggtcaatggtagaaaaggaaatatcttcgtataaaaactagacagaacgattctcagaaactcctttgtgatgtgtgtgttcaactcacagagtttaacctttcttttcatagagcagttaggaaacactctgtttgtaaactctgcaagtggatattcagacctctttgaggccttcgttggaaacgggatttcttcctattctgctagacagaagaattctcagtaacttccttgtgttgtgtgtattcaactcaccgagttgaacgatcctttacacagagcagacttgaaacactccttttgtggaatttgcaagtggagatttcagctgctttcaggtcaatagtagaaaaggaaatatcttcgtagaaaaactagacagaatgattctcagaaactcctttgtgatgtgtacgttcaactcacagagtttaacctttgttttcatagagcagttaggaaacactctgtttgtaaagtctgcaagtggatattcagacctctttgaggccttcgttggaaacgggtttttttcatataaggctagactgaagaattctcagtaacttccttgtgttgtgtgtattcaactgacagagctgaactttcatttagagagagcagatttgaaacactgtttttgtggaatttgcaagtggagatttcaagcgctttggggccaaaggcagaaaaggaaatatccttcgtataaaaactagacagaatcattctcagaaactgctctgcgatgtgtgcgttcaactctcagagtttaacttttattttcattcagcagtttggaaacactctgtttgtaaagtctgcacgtggatattttgaccacttagaggccttcgttggaaacgggtttttttcctgtaaggctagacagaagaattcccagtaacttccttgtgttgtgtacattcaactcacagagttgaacgttcccttagacagagcagatttgaaacactctttttgtgcaattggcaaatggagatttcaagcgctttaaggtcaatggcagaaaaggaaatatcttcgtttcaaaactagacagaatcattcccacaaactgcgttgtgaagtgttcgttcaactcacagagtttaacctttcttttcatagagcagttaggaaacagtctgtttgtcaattctgtaagtggatattctgacatcttgtggccttcgttggaaacgggatttcttcatattctgctagacagaataattctcagtaacttctttgtgttgtgtgtattcaactcacagagttgaaggatcctttacagagagcaggcttgaaacactctttttgtcgaatttgcaagtggagatttcagccgctttgaggtcaatggttgaataggaaatatcttcttatagaaactagacagaatgattctgagaaactcctttgtgatgtgtgcgttcaactcacagagtttaacctttcttttcatagagcagttaggaaacactctgtttgtaaagtctgcaagtggatattcagatctccttgaggccttcgttggaaacgggatttcttcatattatgctagacagaagaattcccagtaacttcgttgtgttgtgtgtgttcaactcacagagttgaactttgatttacacagagcagatttgaaacactctttttgtggaatttgcaagtggagatttcaagcgatttgaggccaaaggcagaaaaggaaatatcttcgtataaaaactagacagaatcattctcagaaactgctctgcgatgtgtgcgtttaactctcagagtttaaattttcttttcattcagcagtgtggaaacactctgtttgtaaagtctgcacgtggatattttgaccacttagaggccttcgttggaaacgggtttttttcctgtaaggctagacagaagcattcccagtaacttccttgtgttgtgtgcattcaactcacagagatgaacgttcccttagacagagcagatttgaaacgctctatttgtgcaatttgcaagtgtagatttcaagcgctttaaggtcaatggcagaaaaggaaatatcttcgtttcaaaactagacagaatcattcccacaaactgcgttgtgatgtgttcgttcaactcacagagtttaacctttctgttcatagagcagttaggaaacactctgtttgtaaagtctgtaagtggatattctgacatcttgtggccttcgttggaaacggggtttcttcatattatgctagacagaagaattctcagaaacttctttgtgttgtgtgtatttaactcacagagttgaacgatcctttacacagagcagacttgaaacactctttttgtggaatttgcaagtggagatttcagccgctttgaggtcaacggtagaataggaaatatcttcctatagaaactagacagaatgattctcagaaactcctttgtgatgtgtgtgttcaactcacagagtttaacctttctattcatagagtagttaggaaacactctgtttgtaaagtctgcaagtggatattcagacctactttgaggccttcgttggaaacaggatttcttcatactatgctagacagaagaattcccagtaacttccttgtgttgtgtgtgttcaactcacagagttgaactttcatttacacagagcagatttgaaacactctttttgtggaatttgcaggtggagatttcaagcgctttgaggccaaaggcagaaaaggaaatatcttcgtataaaaactagacagaatcattctcagaaactgctctgcgatgtgtgcgttcaactctcagagtttaacttttcttttcattcagcagtttggaaacactctgtttctaaagtctacacgtggataatttgaccacttagaggccttcgttggaaacgggtttttttcatgtaaggctagacagaagaattcccagtaacttccttgtgttgtgtgcattcaactcacagagttgaacgttcccttagacagagcagatttgaaacactctatttgtgcaatttgcaagtgtagatttcaagcgctttaaggtcaatggcagaaaaggaaatatcttcgtttcaaaactagacagaatcattcccacaaactgcgttgtgatgtgttcgttcaactcacagagtttaacctttctgttcatagagcagttaggaaacactgtgttagtaaagtctgtaagtggatattctgacatcttgtggccttcgttggaaacgggatttcttcatattctgctagacagaagaattctcagtaacttccttgtgttgtgtgtattcaactcacagagttgaacgatcctttacacagagcagacttgaaacactctttttgtggaatttgcaagtggagatttcagccgcattgaggtcaatggtagaaaaggaaatatcttcgtataaaaactagacagaatgattctcagaaactcctttgtgatgtgtgcgttcaagtcacagagtttaacctttcttttcatagagcagttaggaaacactctgtttgtaaagtctgcaagtggatattcagacctctttgaggccttcgttggaaacgggatttcttcatattctgctagacagaagaattctcagtaacttccttgtgttgtgtgtattcaactgacagagttgaactatcatttagagagagcagatttgaaacactgtttttgtggaatttgcaagtggagatttcaagcgctttggggccaaaggcacaaaaggaaatatcttcgtataaaaactagacagaatcattctcagaaactgcagcgcgatgtgtgcgttcaactctcagagtttaacttttcttttcattcagcggtttggaaacactctgtttgtaaagtctgcacgtggaaattttgaccacttagaggccttcgttggaaacgggtttttttcatgtaaggctagacagaagaattcccagtaacttccttgtgttgtgtgcattcaactcacagagttgaacgttcccttagacagagcagatttgaaacactctatttgtgcaatttgcaagtgtagttttcaagctctttaaggtcaacggcagaaaaggaaatatcttggtttcaaaactagacagaatgattctcagaaactcctttgtgatgtgtgcgttcaactcacacagtttaacctttctttccatagagcagttaggaaacactctgtttgtaaagtctgcaagtggatattcagacctctttgaggccttcgttggaaacgggatttcttcatattctgctagacagaagaattctcaggaacttccttgtgttgtgtgtattcaactcacagagttgaacgatactttacacagagcagacttgaaacactctttttgtggaattcgcaagtggagatttcagccgctttgaggtcaatggtagaataggaaatatcttcctatagaaactagacagaatgattctcagaaactcctttgtgatgtgtgccttcaactcacagagtttaacctttcttttcatagagcagttaggaaacactctgcttgtaaagtctgcaagtggatattcagccctctttgaggccttcgttggaaacgggtttttttcatataaggctagacagaagaattctcagtaacttccttgtgttgtgtgtattcaactgacagagttgaactttcatttagagagagcagatttgaaacactgtttttgtggaatttccaatggagatttcaagcgctttggggtcaaaggcagaaaaggaaatatcttcgtataaaaactagacagaatcattctcagaaactgctctgtgatgtgtgcgttcaactctcagagtttaacttttcttttcattcagcagtttggaaacactctgtttgtaaagtctgcacgtggataatttgaccacttagaggccttcgttggaaaagggtttttttcatgtaaggctagacagaagaattcccagtaacttccttgtgttgtgtgcattcaactcacagagttgaacgttcccttagacagagcagatttgaaacactctatttgtgcaatttgcaagtgtagatttcaagcgctttaaggtcaatggcagaaaaggaaatttcttcgtttcaaaactagacagaatcattcccacaaactgcgttgtgatgtgttcgttcaactcacagcagtttaacctttctgttcatagagcagttaggaaacactctgtttgtaaagtctgtaagtggatattctgacatcttgtggccttcgttggaaacgggatttcttcatattctgctagacagaagaattctcagtaacttccttgtgttgtgtgtattcaactcacagagttgaacgatcctttacacagagcagacttgaaacattctttttgtggaatttgcaatggagatttcagccgctttgaggtcaatggtagaataggaaatatcttcctatagaaactagacagaatgattctcataaactcctttgtgatgtgtgcgttcaactcacagagtttaacctttcttttcatagagcagttaggaaacactctgtttgtaaagtatgcaagtggatattcagacctgcttgaggccttcgttggaaacgggatttcttcatattatgctagacagaagaattcccagtaacttccttgggttgtgtgtgttcaactcacagagttgaactttcgtttacacagagcagatttgaaacactctttttgtggaatttgcaggtggagatttcaagcgctttgaggccaaaggcagaaaaggaaatatcttcgtataaaaactagacagaatcattctcagaaactgctctgcgatgtgtgcgttcaactctcagagtttaacttttcttttcattcagcagtttagaaacactctgtttgtaaagtctgcacgtggataatttgaccacttagaggccttcgttggaaacgggtttttttcatgtaaggctagacagaagagttctcagtaacttccttgtgttgtgtgtattcaactcacacagttgaacgatcctttacacagagcagacttgtaacactctttttgtggaatttgcaagtggagatttcagccgctttgaagtcaaagtagaaaaggaaatatcttccaataaaaactagacagaatcattcccacaaactgcgttgtgatgtgttcgttcaactcacagagtttaaccgttcttttcatagagcagttaggaaacagtctgtttgtcaattctgtaagtggatattctgacatcttgtggccttcgttggaaacgggatttcttcatattctgctagacagaagaattctcagaaacttcgttgtgttgtgtgttttcaaatcacagagttcaacgatcctttacacagagtagacttgaaacactctttttgtggaattggcaaggtggagatttcagccgctttgaggtcaatggtagaataggaaatatcttcgtataaaaactagacagaatgattctcagaaactcctttgtgatgtgtgcgttcaactcacagtagtttaacctttcttttcatagagcagttaggaaacactctgtttgtaaagtctgcaagtggatattcagacctctttgaggccttcgttggaaacgggtttttttcatataaggctagacagaagaattcccagtaacttccatgtgttgtgtgtgttcaactcacagagttgaactttcatttacacagagcagatttgaaacactcattttgtggaatttgcaaatggagatttcaagcgctttgaggccaaaggcagaaaaggaaatatcttcgtataaaaattagacagaatcattctcagaaactgctctgcgatgtgtgcgttcaactctcagagtttaacttttcttttcattcagcagtttggaaacactctgtttgtaaattctgcacgtggataatttgaccacttagaggccttcgttggaaacgggtttttttcctgtaaggctagacagagaagattcccagtaacttccttgtgttgtgtacattcaactcacagagttgaacgttcccttagacagagcagatttgaaacactctttttgtgcaattggcaagtggagatttcaagcgctttaaggtcaatggcagaaaaggaaatatcttcgtttcaaaactagacagatcattcccacaaactgcgttgtgatgtgttcgttcaactcacagagtttaacctttcttttcatagagcagttaggaaacagtctgtttgaaaattctgtaagtggatattctgacatcttgtggccttcgttggaaacgggatttcttcatattctgctagacagaagaattctcagtaacttccttgtgttgtgtgtattcaactcacagagttgaacgatcctttacacagagcagacttgtaaaacttttttgtggaatttgcaagtggagatttcagccgctttgaagtcaaaggtagaaaaggaaatatcttcctataaaaactagacagaatgattctcagaaactcctttgtgatgtgtgtgtccaactcacagagtttaacctttcttttcatagagcagttaggaaacactctgtttgtaaagtctgcaagaggatattcagacctctttgaggccttcgttggaaacgggattttttcatataaggctagacagaagaattctcagtaacttccttgtgttgtgtgttttcaactgacagagttgaactttcatttggagagagcagatttgaaacactgtttttgtggaatttgcaagtggagatttcaagcgctttggggccaaaggcagaaaaggaaatatcttcgtataaaaactagacagaatctttctcagaaactgctctgcgatgtgtgcgttcaactctcagagtttaacttttcttttcattcagcagtttggaaacactctgtttgtaaagtctgcacgtggatattttgaccacttagaggccttcgttggaaacgggtttttttcctgtaaggctagacagaagaattctcagtaactttccttgtgttgtgtgtattcaactcacagagttgaacgatcctttacacagagcagacttgagacactctttttgtggaatttgcaagtggagatttcagccgctttgaggtcaatggtagaaaaggaaatatcttcgtataaaaactagacagaatgattctcagaaacttcattgtgatgtgtgcgttcaactcacagagtttaacctttcttttcatagagcagttaggaaacactctgtttgtaaagtctgcaagtggatattcagacctctttgaggccttcgttggaaacgggatttcttcatactgtgctagacagaagaattctcagtaacttccttgtgttgtgtgtattcaactcacagagttgaacgatcctttagagagagcggacttgaaacactctttttgtggaatttgcaagtggagatttcagccgcgttgaggtcaatgatagaaaaggaaatatcttcgtataaaaactagacagaatgattctcagaaactcctttgtgatgtgtgcgttcaactcacagagtttaacctttcttttcatagagcagttaggaaacactctgtttgtaaagtctgcaagtggatactcagacctctttgaggccttctttggaaacggcatttcttcatattatgctagacagaagaattcccagtaacttccttgtgttgtgtgtgttcaactcatagagttgaactttcatttacacagagcagatttgaaacactctttttgtggaatttgcaaatggagatttcaagcgctttgaggccaaaggcagaaaaggaaatatcttcgtataaaaactcgacagaatcattctcagaaactgctctgcgatgtgtgcgttcaactctcagagtttaacttttcttttcattcagcagtttggaaacactctgtttgtaaagtctgcatgtggaaaacttgaccacttagaggccttcgttggaaacgggtttttttcatgtaaggctagacagaagaattcccagtaacttccttgtgttgtgtgcattcaactcacagagatgaacgttcccttagacagagcagatttgaaacactctatttgtgcaatttgcaagtgtagatttcaagcgctttaaggtcaatggcagaaaaggaaatatctttgtttcaaaactagacagaatcattcccacaaactgcgttgtgatgtgttcgttcaactcacagagttttacctttctgttcatagagcagttaggaaacactctgtttgtaaagtctgtaagtggatattctgacatcttgtggccttcgttggaaaagggatttcttcatattctgctagacagaagaattctcagaaacttccttgtgttgtgtgttttcaactcacagagttgaacgacgctttacacagagtagacttgaaacactctttttgtgtaatttgcaagtggagatttcagccgctttgaggtcaatggtagaaaaggaaatatcttcgtataaaaactagacagaatgattctcagaaactcctttgtgatgtgtgcgttcaactcacagagtttaacctttcttttcatagagcagttaggaaacactctgtttgtaaagtctgtaagtggatattcagacctctttgaggccttcgttggaaacgggatttcttcgtattctgctagacagaagaattcccagtaacttccttgtgttgtgtacattcaactcacagagttgaactttgatttacacagagcagatttgaaacactctttttgtggaatttgcaagtggagatttcaagcgctttgaggccaaaggcagaaaaggaaatatcttcgtataaaaactagacagaatcattctcagaaactgctctgcgatgtgtgcgttcaactctcagagtttaacttttcttttcattcagcagtttggaaacactctgtttgtaaagtctgcacgtcgatattttgaccacttagaggccttcgttggaaacgggtttttttcctgtaaggctagacagaagaattcccagtaacttccttgtgttgtgtgcattcaactcacagagttgaacgttccattagacagagcagatttgaaacactctatttgtgcaatttgcaagtgtagatttcaagcgctttaaggtcaatggcagaaaaggaaatatcttcgtttcaaaactagacagaatcattcccacaaactgcgttgtgatgtgttcgttcaactcacagcagtttaacctttctgttcacagagcagtgaggaaacactctgtttgtaaactctgtaagtggatattctgacatcttgtggccttcgttggaaaagggatttcttcatattctgctagacagaaggattctcagtaacttccttgtgttgtgtgtattcaactcacagagttgaacgatcctttacacagagcagacttgaaacactctttttgtggaatttgcaagtggagatttcagccgctttgaggtcaatagtagaaaaggagatatcttcgtataaaaactagacagaatgattctcagaaactcctttgtgatgtgtgcgttcaactcacagagtttaacctttcttttcatagagcagttaggaaacactctgtttgtaaagtctgcaagtggatattcagacctccttcaggccttcgttggaaacgggattttttcatataaggctagacagaagaattcccagtaacttccttgtgttgtgtgtgttcaactcacagagttgaactttcatttacacagagcagatttgaaacactctttttgtggaatttgcaaatggagatttcaagcgctttgaggccaaaggcagaaaaggaaatatctttctataaaaactagacagaatcattctcagaaactgctgcgtgatgtgtgcgttcaactctcagagtttaacttttcttttcattcagcggtttggaaacactctgtttgtaaagtctgcacgtggaaattttgaccacttagaggccttcgttggaaacgggtttttttcatgtaaggctagacagaagaattcccagtaacttccttgtgttgtgtgcattcaactcacagagttgaacgttcccttagacagagcagatttgaaacactctatttgtgcaatttgcaagtgtagttttcaagctctttaagatcaacctgcagaaaaggaaatatcttcgtttcaaaactagacagaatcattcccacaaactgcgttgtgatgtgttcgttcaactcacagagtttaacctttctgttcacagagcagttaggaaacactctgtttgtaaagtctgtaagtggatattctgacatcttgtggccttcgttggaaacgggatttcttcatattctgctagacagaagaattctcagtaacttccttgtgttgtgtgtattcaactcacagagttgaacgatcctttacacagagcagacttgaaacactctttttgtggaatttgcaagtggagatttcagccgcgttgaggtcaatgttagaaaaggaaatatcttcgtataaaaactagacagaatgattctcagaaactcctttgtgatgtgtgcgttcaactcacagagtttaacctttcttttcatagagcagttaggaaacactctgtttgtaaagtatgcaagtggatattcagacctgcttgaggccttcgttggaaacgggatttcttcatattatgctaggcagaagaattctcagtaacttccttgtgttgtgtgtattcaactgacagagttgaactttcatttagagagagcagatttgaaacactgtttttgtggaatttgcaagtggagatttcagccgctttgaggtcaatagtagaaaaggaaatatcttcgtagaaaaactagacagaatgattctcagaaactcctttgtgatgtgggcgttgaactcacagagtttaacctttcttttcatagagcagttaggaaacactctgtttgtaaagtctgcacatggatattttgaccacttagaggccttcgttggaaacgggtttttttcatgtatggctagacagaagaattcccagtaacttccttgtgttgtgtgcattcaactcacagagttgaacgttcccttagacagagcagatttgaaacactctatttgtgcaatttccaagtgtagatttcaagcgctttaaggtcaacggcagaaaaggaaatatcttcgtttcaaaactagacagaatcattcccacaaactgcgttgtgatgtgttcgttcaactcacagtgtttaacctttctgttcatagagcagttaggaaacactctgtttgtaaagtctgtaagtggatattctgacatcttgtggccatcgttggaaacgggatttcttcatattctgctagacagaagaattcccagtaacttccttgtgttgtgtgcattcaactcacagagttgaacgatcctttacacagagcagacttgaaacacactttttgtggaatttgcaagtggagatttcagccgctttgaggttaatggtagaaaatgaaatatcttcgtatagaaactagacagaatgattctcagaaactcctttgtgatgtgtgcgttcaactcacagagtttaacctttcttttcatagagcagttaggaaacactctgtttgtaaagtctgcaagtggatattcagacatccttgaggctttcgtttgaaacgggatttcttcatattctgctagaaagaagaattcccagtaacttccttgtgttgtgtgtgttcaactcacagagttgaactttcatttacacagagcagatttgaaacactctttttgtggaatttgcaagtggagatttcaagcgctttggggccaaaggcagaaaaggaaatatcttcgtttcaaaactagacagaatcattctcagaaactgctctgcgatgtgtgcgttcaactctcagagtttaacttttcttttcattcagcagtttggaaacactctgtttgtaaagtctgcacgtggatattttgaccacttagaggccttctttggaaacgggtttttttcctgtaaggctagacagaagaattcccagtaacttccttgtgttctgtacattcaactcacagagttgaacgttcccttagacagagcagatttgaaacactctttttgtgcaattggcaagtggagatttcaagcgctttaaggtcaatggcagaaaaggaaatatcttcgtttcaaaagtagacagaatcattcccacaaactgcgttgtgatgtgttcgttcaactcacagagtttaacctttctgttcatagagcagttaggaaacactctctttgtaaagtctgtaagtggatattctgatatcttgtggccttcgttggaaacgggatttcttcatattctgctagacagaagaattctcagtaacttcccttgtgttgtgtgtattcaactcacagagttgaacgatcctttacagagagcagacttgaaacactctttttgtggaatttgcaagtggagatttcagccgctttgaggtcaatggtagaaaaggaaatatcttcgtataaagaatagacagaatgattctcagaaacttctttgtgatgtgtgcgttcaactcacagagtttaacctttcttttcatagagcagttaggaaacactctgtttgtaaagtctgcaagtggatattcagacctctttaaggccttcgttggaaacgggtttttttcatataaggctagacagaagaattcccagtaacttccttgtgttgtgtgtgttcaactcacagagttgaactttcattttcacagagcagatttgaaacactctttttgtggaatttgcaaatggagatttcaagcgctttgaggccaaaggcagaaaaggaaatatcttcgtataaaaactagacagaatcattctcagaaactgctgcgtgatgtgtgcgttcaactctcagagtttaacttttcttttcattcagcggtttggaaacactctgtttgtaaagtctgcacgtggaaattttgaccacttagaggccttcgttggaaacgggattttttcatgtaaggctaggcagaagaattcccagtaacttccttgcgttgtgtacattcaactcacagagttgaacgttcccttagacagagcagatttgaaacactctttttgtgcaattggcaagtggagatttcaagcgctttaaggtcaatggcagaaaaggaaatatcttcgtttcaaaactagacagaatcattcccacaaactgcgttgtgatgtgttcgttcaactcacagagtttaacctttctgttcatagagcagttaggaaacactctgtttgtaaagtctgtaagtggatattctgaaatcttgtggccttcgttggaaacgggatttcttcatattgtgctagacagaagaattctcaataacttccttgtgttgtgtgtattcaactcacagagttgaacgatcctttacacagagcggacttgaaacactcgttttgtggaatttgcaagtggagatttcagccacgttgaggtcaatggtagaaaaggaaatatcttcgtataaaaactagacagaatgattctcagaaactcctttgtgatgtgtgcgttcaactcacagagttcaacctttcttttcatagagcagttgggaaacactctgtttgtaaagtctgcaagtggatattcagacttccttgaggccttcgttggaagcgggatttcttcatattctgctagacagaataattctcagtaacttccttgtgttgtgtttattcaactaacagagttgaactttcatttggagagagcagatttgaaacactgtttttgtggaatttgcaagtggagatttcaagcgctttggggccaaaggcagaaaaggaaatatcttcgtataaaaactagacagaatcattctcagaaactgctctgcgatgtgtgcgttcaactctcagagtttaacttttcttttcattcagcagtttggaaacactctgtttgtaaagtctgcacgtggatattttgaccacttagaggccttcgttggaaacgggttttttcctgtaaggctagacaaaagaattcccagtaacttccttgtgttgtgtacattcaactcacagagttgaacgttcccttagacagagcagatttgaaacactctttttgtgcaattggcaagtggagatttcaagcgctttaaggtcaatggcagaaaaggaaatatcttcgtttcaaaactagacagaatgattctcagaaactcctttgtgatgtgtgcgttcaactcacagagtttaacctttcttttcatagagcagttaggaaacactctgtttgtaaagtctgcaagtggatatgcagacttctttgaggccttcgttggaagcgggattgcttcatattctgctatacagaagaattctcagtaacttccttgtgttgtgtgtattcaactcacagagttgaacgatcctttacacagagcagacttgaaacactctttttttggaatttgcaagtggagatttcacccgctttgaggtcaatggtagactaggaaatatcttcctatagaaactagacagaaatgattctcagaaactcctttgtgatgtgtgcgttcaactcacagagtttaacctttcttttcatagagcagttaggaaacactctgtttgtaaagtctgcaagtggatattcagacctctttgaggccttcgttggaaacgggatttcttcatattctgctagacagaagaattctcagtaacttccttgtgttgtgtgtattcaactgacacagttgaactttcatttagagagagctgatttgaaacactgtttttgtggaatttgcaagtggagatatcaagcgctttggggccaaaggcagaaaaggaaatatcttcgtataaaaactagacagaatcattctcagaaactgctgcgtgatgtgtgcgttcaactctcagagtttaacttttcttttcattcagcggtttggaaacactctgtttgtaaagtctgcacgtggatattttgaccacttagaggccttcgttggaaacgggtttttttcatgtaaggctagacagaagaattcccagtaacttccttgtgttgtgtgcattcaactcacagagttgtacgttcccttagacagagcagatttgaaacactctatttgtgcaatttgcaagtgtagatttcaagcgctttaaggtcaatggcagaaaaggaaatatcttcgtttcaaaactagacagaatcattcccacaaactgcgttgtgatgtgttcgttcaactcacagagtttaacctttctgttcatagagcagttaggaaacactctgtttgtaaagtctgcaagtggatattcagacctccttgaggccttcgttggaaacgggatttcttcatattctgctagacagaagaattctcagtaacttccttgtgttgtgtgtattcaactcacagagttgaacgatcctttacacagagcagacttgaaacactctttttgtggaatttgcaagtagagatttcagccgctttgaggtcaatggtagaaaaggaaatatcttcgtataaagactagacagaatgattctcagaaactcctttgtgatgtgtgcgatcaactcacagagtttaacctttcttttcatagagcagttaggaaacactctgtaaagtctgcaagtggatattcagacatccttgaggctttcgttggaaacgggatttcttcatattctgctagaaagaagaattctcagtaacttccttgtgttgtgtgtattcaactcagagttgaacgatcctttacacagagcagacttgaaacactctttttgtggaatatgcaagtggagatttcagccgctttgaggtcaatgttagaataggaaatatcttcctatagaaactagacacaatcattctcagaaactgctctgcgatgtgtgcgttcaactctcagagtttaacttttcttttcattcagcagtttggaaacactctgtttgtaaagtctgcacgtggataatttgaccacttagaggccttcgttggaaacgggtttttttcatgtaaggctagacagaagaattcccagtaacttccttgtgttgtgtgcattcaactcacagagttgaacgttcccttagacagagcagatttgaaacactctatttgtgcaatttgcaagtgtagatttcaagctctttaaggtcaacggcagaaaaggaaatatcttcgtttcaaaactagacagaatcattcccacaaactgcgttgtgatgtgttcgttcaactcacagagtttaacctttcttttcatagagcagttaggaaacagtctgtttgtaaattctgtaagtggatattctgacatgttgtggccttcgttggaaacgggatttcttcatattctgctagacagaagaattctcagtaacttccttgtgttgtgtgtattcaactcacagagttgaacgatcctttacacagagcagacttgaaacattctttttgtggaatttgcaaatggagatttcagccgctttgaggtcaatggtagaataggaaatatcttcctatagaaactagacagaatgattctcagaaactcctttgtgatgtgtgcgttcaactcacagagtttaacctttcttttcatagagcagttagtaaacactctgtttataaagtctgcaagtggatattcagacccctttgaggccttcgttggaaacgggatttcttcatattatgctagacagaagaattctcactaacttccttctgttgtgtgtattcaactgacagagttgaactttcatttagagagagcagatttgaaacactgtttttgtggaatttgcaagtggagatttcaagcgctttcgggccaaaggcagaaaaggaaatatcttcgtataaaaactagacagaaatcattctcagaaactgctctgcgatgtgtgcgttcaactctcagagtttaacttttcttttcattcagcagtttggaaacactctgtttgtaaagtctgcacgtggatattttgaccacttagaggccttcgttggaaacgggtttttttcctgtaaggctaaacagaagaattctcagtaacttccttgtgttgtgtgtattcaactcacagagttgaacgatcctttacacagagcagacttgaaacactctttttgtggaatttgcaagtggagatttcagccgctttggggtcaatggtagaataggaaatatcttcctatagaaactagacagaatgattctcagaaactcctttgtgatgtgtgcgttcaactcacagagtttaacctttcttttcatagagcagttaggaaacactctttttgtaaagtctgcaagtggaaattcagacatccttgaggctttcgttggaaacgggatttcttcatgttctgctagaaagaagaattctcagtaacttccttgtgttgtgtgtattcaactcacagaggtgaacgatcctttacacagagcagacttgaaacactctttttgtggaatttgcaagtggagatttcagccgctttgaggtcaatggtagaaaaggaaatatcttcgtataaagactagacagaatgattctcagaaactcgtttgtgatgggtgcgttcaactcacagagattaacttttcttttcatagagcagttaggaaacactctgtttgtaaagtctgcaagtggatattcagacctctttgtggccttcgttggaaacgggatttcttcatattatgctagacagaagaattcccagtaacttcccttgtgttgtgtgcattcaactcacagagttgaacgttcccttagacagagcagatttgaaacactctatttgtgcaatttgcaagtgtagatttcaagcgcattaaggtcaatggcagaaaaggaaatatcttcgtttcaaaactagacagaatcattcccacaaactgcgttgtgatgtgttcgttcaactcacagagtttaacctttcttatcatagagcacttaggaaacagtctgtttgtaaattctgtaagtggatattctgacatcttgtggccttcgttggaaacgggatttcttcatattctgctagacagaagaattcccagtaacttccttgtgttgtgtgcattcaactcacagagttgaacgttcccttagacagagcagatttgaaacactctatttgtgcaatttgcaagtgtagttttcaagctctttaaggtcaacggcacaaaaggaaatatcttcgtttcaaaactagacagaatcattcccacaaacagcgttgtgatgtgttcgttcaactcacagagtttaacctttcttttcatagagcagttaggaaacagtctgtttgtcaattctgtaagtggatattctgacatcttgtggccttcgttggaaacgggatttcttcatattctgctagacagaagaattctcagtaactttccttgtgttgtgtgtattcaactcacagagttgaacgatcctttacacagagcagacttgaaacactctttttgtggaatttgcaagtggagatttcagccgctttgagttcaatggtagaataggaaatatcttcctatagaaactagacagaatgattctcagaaactcctttgtgatgtgtgcgttcaactcacagagtttaacctttcttttcatagaccagttaggaaacactctgtttttatagtctgtaagtggatattcagacatctttgaggccttcgttggaaacgggatttcttcatattctgctatacagaagaattctcagtaacttccttgtgttgtgtgtattcaactgacagagttgaacattcatttagagagagcagatttgaaacactgtttttgtggaatttgcaagtggagatttcaagcgctttggggccaaaggcagaaaaggaaatatcttcgtataaaaactagacagaatcattctcagaaactgctgcgtgatgtctgcgttcaactctcagagtttaacttttcttttcattcagcggtttggaaacactctctttgtaaagtctgcacgtggatattttgacctcttagacgccttcgttggaaacgggttttcttcatgtaaggctagacagaagaattcccagtaacttccttgtgttgtgtgcattcaactcacagagttgaacgttcccttagacagagcagatttgaaacactctatttgtgcaatttgcaagtgtagatttcaagcgctttaaggtcaatggcagaaaaggaaatttcttcttttcaaaactagacagaaatcattcccacaaactgcgttgtgatgtgttcgttcaactcacagagtttaacctttctgttcatagagcagttaggaaacactctgtttgtaaagtctgtaagtggatattctgacatcttgtggccttcgttgggaacgggatttcttcatattctgctagacagaagaattctcagtaacttccttgtgttgtgtgtattcaactcacagagttgaacgatcctttacacagagcagacttgaaacactctttttgtggaatttgcaagtagagatttcagccgctttgaggtcaatggtagaataggaaatatcttcctatagaaactagacagaatgattctcataaactcctttgtgatgtgtgcgttcaactcacagagtttaacttttcttttcatagagcagttaggaaacactctgtttgtaaagtctgcaagtggatattcagacctctttgaggccttcgttggaaacgggatttcttcatattctgctagacagaagaattcccagtaacttccttgtgttgtgtgtgttcaactcacagagttgaactttcatttacacagagcagatttgaaacactctttttgtggaagttgcaagtggagatttcaagcgctttgaggccaaaggcagaaaaggaaatatcttcgtttcaaaactagacagaatcattctcagaaactgctctgcgatgtgtgcgttcaactctcagagtttaacttttcttttcattcagcagtttggaaacactctgtttgtaaagtctgcacgtggagaatttgaccacttagaggccttcgttggaaacgggtttttttcatgtaaggctagacagaagaattcccagtaactcccttgtgttgtgtacattcaactcacagagttgaacgttcccttagacagagcagatttgaaacactctttttgtgcaattggcaaatggagatttcaagcgctttaaggtcaatggcagaaaaggaaatatcttcgtttcaaaactagacagaatcattcccacaaactgcgttgtgatatgttcgttcaactcacagagtttaacctttcttttcatagagcagttaggaaacagtctgtttgtaaattctgtaagtggatattctgacatcttgtggccttcgttggaaacgggatttcttcacattctgctagacagaagaattctcagtaacttccttgtgttgtgtgtattcaactcacagagttgaacgatcctttacacagagcagacttgaaacactctttttgtggaatttgcaggtggagatttcagccgctttgtgttcaatggtagaataggaaatatcttcctatagaaactagacagaatgattctcagaaaatcctttgtgatgtgtgcgttcaactcacagagtttaacctttcttttcatagagcagttaggaaacactctgtttgtaaagtctgcaagtggatattcagacaactttgaggctttcgttggaaacgggatttcttcatattctgctatacagaagaattctcagtaacttccttgtgttgtgtgtattcaactgacagagttgaactttcatttagacagagcagattagaaacactctttttgtggaatttgcaagtggagatttcaagggctttgaggccaaaggcagaaaaggaaatatcttcgtataaaaactagacagaatcattctcagaaactgctctgcgatgtgtgcgttcaactctcagagtttaacttttcttttcattcagcagtttggaaacactctgtttgtaaagtctgcacgtggataacttgaccacttagaggccttcgttggaaacggttttttttcatgtaaggctagacagaagaattctcagtaacttccttgtgttgtgtgtattcaactgacagagttgaactttcatttagagagagcagatttgaaacactgtttttgtggaatttgcaagtggtgatttcaagcgttttggggccaaaggcagaaaaggaaatatcttcgtataaaaactagacagaatcattctcagaaactgctctgcgatgtgtgcgttcaactctcagagtttaacttttcttttcattcagtagtttggaaacactctgtttgtaaagtctgcacgtggataatttgaccacttagaggccttcgttggaaacgggtttttttcatgtaaggctagacagaagaattctcagtaacttccttgtgttgtgtgtattcaactcacagagttgaacgatcgtttacacagagcagacttgagacactctttttgtggaatttgtaagtggagatttcagccgctttgtggtcattggtagaaaaggaaatatcttcatataaaaactagacagaatgattctcagaaactcctttgtgatgtgtgcgttcaactcacagagtttaacctttcttttcatagagcagttaggaaacactctgtttgtaaagtctccaagtggatattcagacctctttgaggccttcgttggaaacgggttttttcatataaggctagacagaagaattcccagtaacttccttgtgttgtgtgtgttcaactcacagagttgaactttcatttacacagagcagatttgaaacactctttttgtggaatttgcaagtggagatttgaagcgctttgaggccaaaggcagaaaaggaaatatcttcgtataaaaactagacagaatcattctcagaaactgctgcgtgatgtgtgcgttcaactctcagagtttaacttttcttttcattcagcggtttggaaacactctgtttgtaaagtctgcacgtggaaattttgaccacttagaggccttcgttggaaacgggattttttcatgtaaggctaggcagaagaattcccagtaacttcccttgtgttgtgtgcattcaactcacagagttgaacgttcccttagacagagcagatttgaaaaactctatttgtgcaatttgcaagtgtagatttcaagcgctttaaggtcaatggcagaaaaggaaatatcttcgtttcaaaactagacagaatcattcccacaaactgcgttgtgatgtgttcgttcaactcacagagtttaacctttctgttcatagagcagttaggaaacactctgtttgtaaagtctgaaagtggatattctgacatcttgtggccttcgttggaaacgggatttcttcatattctgctagacagaagaattctcagtaacttccttgtgttgtgtgtattcaactcacagagttgaacgatcctttacacagagcagacttgaaacactctttttgtggaatttgcaagtggagatttcagccgctttgaggtcaacggtagaaaaggaaatatcttcgtataaagactagacagaatgattctcagaaacttctttgtgatgtgtgcgttcaactcacagagtttaacctttcttttcatagagcagttaggaaacactctgtttgtaaactctgcaagtggatattcagacctctttgaagccttcgttggaaacgggatttcttcatactatgctagacagaagaattctcagtaacttctttttgttgtgtgtattcaactcacagagttgaacgatcctttacacagagcagacttgaaacactcgttttgtggaatttgcaagtggagatttcagccgcgttgaggtcaatggtagaaaaggaaatatcttcgtataaaaactagacagaatcattctcagaaactgctctgcgatgtgtgcgttcaactctcaagagtttaactttgcttttcattcagcagtttggaaacactctgtttgtaaagtctgcacgtggataatttgaccacttagaggccttcgttggaaacgggtttttttcatgtaaggctagacagaagaattcccagtaacttccttgtgttgtgtacattcaactcacagagttgaacgatcctttacacagagcagacttgtaacactctttttgtggaatttgcaagtggagatttcagccgctttgaagtcaaaggtagaaaaggaaatatcttcctataaaaactagacagaaagattctcagaaactcctttgtgatgtgttcgttcatctcacagagtttaacctttcttttcatagagcagttaggaaacagtctgtttgtaaattctgtaagtggatattctgacatcttgtggccttcgttggaaacgggatttcttcatattctgctagacagaagaattctcagtaacttccttgtgttgtgtgtattcaactcacagagttgaacgatcctttacacaaagcagacttgaaacactctttttgtggaatttgcaagtggagatttcagccgctttgaggtcaatggtagaaaaggaaatatcttcgtataaagactagacagaatgattctcagaaactcttttgtgatgtgtgcgttcaactcacagagtttaacctttctgttcatagagctggtaggaaacactctgtttgtaaagtctgcaagtggatattcagacctccttgaggccttcgttggaaacgggatttcttcatattctgctagacagaagaattctcagaaacttccatgtgttgtgtgttttcaactcacagagttgaacgatgctttacacagagtagacttgaaacactctttttgtgtaatttgcaagtggagatttcagccgctttgaggtcaatggtagaaaaggaaatatcttcgtataaaaactagacagaatgattctcagaaacttctttgtgatgtgtgcgttcaactcacagagtttaacctttcttttcatagagcagttaggaaacactctgtttgtaaactctgcaagtggatattcagacctctttgaggccttcgttggaaacgggatttctccatactgtgctagacagaagaattctcagtaactaccttgtgttgtgtgtattcaactcacagagttgaacgatcctttacacagagcggacttgaaacactcgttttgtggaatttgcaagtggagatttcagccgcgttgaggtcaatggtagaaaaggaaatgtcttcgtataaaaactagacagaatcattctcagaaactgctctgcgatgtgtgcgttcaactctcagagtttaactttgcttttctttcagcagtttggaaacactctgtttgtaaagtctgcacgtggataatttgaccacttagaggccttcgttggaaacgggtttttttcatgtaaggctagacagaagaattcccagtaacttccttgtgttgtgtgcattcaactcacagagttgaacgttcccttagacagagcagatttgaaacactctatttgtgcaatttgcaagtgtagatttcaagcgcattaaggtcaatggcagaaaaggaaatatcttcgtttcaaaattagacagaatcattcccacaaactgcgttgtgatgtgttcgttcaactcacagagtttaacctttcttttcatagagcagttaggaaacactctgttgtaaattctgtaagtggatattctgacatcttggggccttcgttggaaacgggatttcttcatattctgctagacagaagaatgctcagtaacttccgcgtgttgtgtgtattcaactcagagagttgaacgatcctttacacagagcagacttgaaacactctttttgtggaatttgcaagtggagatttcagccgctttgaggtcaatggtagaaaaggaaatatcttcctataaaaactagacagaatgattctcagaaactcctttgtgatgtgtgtgttcaactcacagagtttaacctttctattcatagagtagttaggaaacactctgtttgtaaagtctgcaagtggatattttgacctctttgaggccttcgttggaaacgggtttttttcatgtaaggctagacagaagaattcccagtaacttccttgtgttgtgtgtgttcaactcacagagttgaactttcatttacacagagcagatttgaaacactctttttgtggaatttgcaagtggagatttcaagcgatttgaggccaaaggcagaaaaggaaatatcttcgtataaaaacgagacagaatcatgctcagaaactgctctgcgatgtgtgcgttcaactctcagagtttaacttttcttttcattcagcagtttggaaacactctgtttgtaaagtctgcacgtgcataatttgaccgcttagaggccttcgttggaaacgggtttttttcatgtaaggctagacagaagaattcccagtaactttccttgtgttgtgtgcattcaactcacagagttgaacgttcccttagacagagcagatttgaaacactctatttgtgcaatttgcaagtgtagatttcaagcgctttaaggtcaatggcagaaaaggaaatatcttcgtttcaaaactacacagaatcattcccacaaactgcgttgtgatgtgttcgttcaactcatagagtttaacctttctgttcatagagcagttaggaaacactctgtttgtaaagtctgtaagtggatattctgacctcttgtggccttcgttggaaacgggatttcttcatattctgctagacagaataattctcagtaacttccttgtgttgtgtgtattcaactcacagtagttgaaggatcctttacagcgagcaggcttgaaacactctttttgtcgaatttgcaagtggagatttcagccgctttgaggtcaatggtagaataggaaatatcttcttatagaaactagacaaaatgattctcataaactcctttgtgatgtgtgcgttcaactcacagagtttaacctttcttttcatagagcagttaggaaacactctgtttgtaaagtctgcaagtggatattcagacctctttgagaccttcgttggaaacgggatttcttcatattctgctagacagaagaattctcagtaacttccttgtgttgtgtgtattcaactgacagagttgaactttcatttagagggagcagatttgagacactgtttttgtggaatttgcaattggagatttcaagcgcttcggagccaaaggcagaaaaggaaatatcttcgtataaaaactaggcagaaccattctcagaaactgctgcgtgatgtgtgcgttcaactctcagagtttaacttttcttttcattcagcggtttggaaacactctgtttgtaaagtctgcacgtggatattttgaccacttagaggccttcgttggaatcgggtttttttcatgtaaggctagacagaagaattctcagaaacttccttgtgttgtgtgttttcaactcacagagttgaacgatgctttacacagagtagacttgaaacactctttttgtgtaatttgcaagtagagatttcagccgctttgaggtcaacggtagaaaaggaaatatcttcgtataaaaactagacagaatgattctcagaaactcctttgtgatgtgtgcattcaactcacagagtttaacctttcttttcatagaacagttaggaaacactctgtttgtaaagtctgcaagtggatattcagacctctttgaggccttcgttggaaacgggatttcttcatattatgctagacagaagaattctcagtaacttccttgtgttgtgtgtattcaactcacagagttgaacgatcctttacacagagcagacttgaaacactctttttgtggaaattgcaagtggagatttcagccgctttgaggtcaatggtagaaaaggaaatatcttcgtataaaaactagacacaatgattctcagaaactcctttgtgatgagtgcgttcaactcacagattttaacctttcttttcatagagcagttaggaaacactctgtttgtaaagtctgcacgtggatattttgacctctttgaggccttccgtggaaacgggattttttcatataaggctagacagaagaattctcagtaacttccttgtgttgtgtgtattcaactcacagagttgaactttcatttacacagagcagatttgaaacactctttttgtggaatttgcaaatggagatttcaagcgctttgaggccaaaggcagaaaaggaaatatcttcttataaaaactagacagaatcattctcagaaactgctctgcgatgtgtgcgttcaactctcagagtttaacttttcttttcattcagcagtttgtaaacactctgtttgtaaagtctgcacgttgataatttgaccacttagaggccttcgttggaaacgggtttttttcatataaggctagacagaagaattcccagtaacttccttgtgttgtgtacattcaactcacagagttgaacgttcccttagacagagcagatttgaaacactctttttgtgcaattggcaaatggagatttcaagcgctttaaggtcaatggcagaaaaggaaatatcttcgtttcaaaactagacagaatgattctcagaaagtcctttgtgatgtgtgcgttcaactcacagagttcaacctttcttttcatagagcagttgggaaacactctgtttgtaaagtctgcaagtggatattcagacttctttgaggccttcgttggaagcgggatttcttcatattctgctagacagaagaattctcagtaacttccttgtgttgtgtgtattcaactcacagagttgaacgatcctttacacagagcagacttgaaacactctttttgtggaatttgcaattggagatttcagccgctttgaggtcaatggtagaataggaaatatcttcctatagaaactagccagaatgattctcagaaactcctttgtgatgtgtgcgttcaactctcagagtttaacttttcttttcattcagcaggttggaaacactctgtttgtaaagtctgcacgtggataatttgaccacttagaggccttcgttggaaacgggtttttttcctgtaaggctagacaaaagaattcccagtaacttccttgtgttgtgtgtgttcgactcacagagttgaactttcatttacagagagcagatttgaaacactctttttgtggaatttgcaagtggagatttcaagcgctttgaggccaaaggcagaaaaggaaatatcttcgtttcaaaactagacagaatcattctcagaaactgctgcgtgatgtgtgcgttcaactctcagagtttaacttttcttttcattcagcggtttggaaacactctgtttgtaaagtctgaacgtggaaattttgaccacttagaggccttcgttggaaacgggtttttttcttgtaaggctagacagaagaattcccagtaacttccttgtgttgtgtgcattcaactcacagagttgaacgttcccttagacagagcagatttgaaacactctatttgtgcaatttgcaagtgtagatttcaagcgctttaaggtcaatggcagaaaaggaaatatcttcgtttcaaaactagacagaatgattctcagaaactcctttgtgatgtgtgcgttcaactcacagagtttaacctttcttttcatagagcagttaggaaacactctgtttgtaaagtctgcaagtggatattcagacctccttgaggccttcgttggaaacgggatttcttcatattatggtagacagaagaattctcagtaacttccttgtgttgtgtgtattcaactcacagagttgaacgatcctttacacagagcagacttgaaactctctttttgtggaatttgcaagtggagatttcagccgctttgaggtcaatggtagaataggaaatatcttcctatagaaactagacagaatgattctcagaaactcctttgtgatgtgtgtgttcaactcacagaatttaacctttcttttcatagagcagttagtaaacactctgtttataaagtctgcaagtggatattcagacccctttgaggccttcgttggaatcgggatttcttcatattatgcaagacagaagaattcccagtaacttccttgtgttgtgtgtgttcaactcacagcgttgaactttcatttacacagagcagatttgaaacactctttttgtggaatttgcaagtggagatttcaagcgctttgaggccaaaggcagaaaaggaaatatcttcgtataaaaattagacagaatcattctcagaaactgctctgcgatgtgtgcgttcaactctcagagtttaactttgcttttcattcagcagtttggaaacactctgtttgtaaagtctgcacgtggataatttgaccacttagaggccttcgttggaaacgggttttttttatgtaaggctagacagaagaattcccagtaacttccttgtgttgtgtgcattcaactaacagagttgaacgttcccttagacagagcagatttgaaacactctatttgtgcaatttgcaagtgtagatttcaagcgctttaaggtcaatggcagaaaaggaaatatcttcgtttcaaaactagacagaatcattcccacaaactgcgttgtgatgtgttcgttcaactcacagagtttaacctttctgttcatagaacagttaggaaacactctgtttgtaaagtctgcaagtggatattcagacctctttgaggccttcgttggaaacgggatttcttcatattatgctagacagaagaattctcagtaacttccttgtgttgtgtgtattcaactcacagagttgaacgatcctttacacagaccagacttgaaacactctttttgtggaatttgcaaatggagatttcagccgctttgaggtcaatggtagaaaaggaaatatcttcgtataaacactagacagaatgattctcagaaactcctttgtgatgtgtgcgttcaactcacagagtttaacctttcttttcatagagcagttaggaaacactctgtttgtaaagtctgcaagtggatattcagacatctttgaggctttcgttggaaacgggatttcttcatattctgctatacagaagaattctcagaaacttccttgtgttgtgtgttttcaactcacagagttgaacgatgctttacacagagcagacttgaaacactctttttgtggaatttgcaagtggagatttcagccgctttgaggtcaatggtagaataggaaatatcttcctatagaaactagacagaatcattctcagaaactgctctgcgatgtgtgcgttcaactctcagagtttaacttttcttttcattcagcagtttggaaacactctgtttgtaaagtctgaaggtggatattttgaccacttagaggccttcgttggaaacgggtttttttcctgtaaggctagacagaagaattcccagtaacttccttgtgttgtgtacattcaactcacagagttgaacgttcccttagacagagcagacttgtaacactctttttgtgtaatttgcaagtggagatttcagccgctttgaagtcaaaggtagaaaaggaaatatcttcctataaaaagtagacagaatcattcccacaaactgcgttgtgatgtgttcgttcaactcacagagtttaacctttctgttcatagagcagttaggaaacactctgtttgtaaagtctgcaagtggatattcagacctccttgaggccttcgttggaaacgggatttcttcatattctgctagacagaataattctcagtaacttccttgtgttgtgtgtattcaactcacagagttgaacgatcctttacacagagcagacttgaaacactctttttgtggaatttgcaagtgtagatttcaagcgctttaaggtcaatggcagaaaaggaaatatcttcgtttcaaaactagacagaatgattctcagaaactcctttgtgatgtgtgcgttgaactcacagagtttaacctttcttttcatagagcagttaggaaacactctgtttgtaaagtctgcaagtggatattcagacatcgttgaggctttccttggaaacgggatttcttcatattctgctagaaagaagaattcccagtaacttccttgtgttgtgtgtgttcaactcacagagttgaactttcatttacacagagcagatttgaaacactctttttgaggaatttgcaagtggagatgtcaagcgctttgaggccaaaggcagaaaaggaaatatcttcgtttcaaaactagacagaatcattctcagaaactgctctgcgatgtgtgcgttcaactctcagagtttaacttttcttttcattcagcagtttggaaacactctgtttgtaaagtctccacgtggatattttgaccacttagaggccttcgttggaaacgggtttttttcctgtaaggctagacagaagaattcccagtaacttccttgtgttgtgtacattcaactcacagagttgaacgttcccttagacagagcagatttgaaacactctttttgtgcaattggcaagtggagatttcaagcgctttgaggtcaatggcagaaaaggaaatatcttcgtttcaaaactagacagaataattcccacaaactgcgttgtgatgtgttcgttcaactcacagagtttaacctttgttttcatagaggagttaggaaacagtctgtttgtaaattctgtaagtggatattgtgacatcttgtggccttcgttggaaacgggatttcttcatattctgctatacagaagaattctcagtaacttccttgtgttgtgtgtattcaactcaaagagttcaacgatcctttatacagagcagacttgaaacactctttttgtggaatttgcaagtggagatctcagccgatttgtggtcaatagtagaaaaggaaatatcttcgtataaaaactagacagaatgactctcagaaactcctttgtgatgtgtgcgttcaactcacagagtttaacttttcttttcatagaccagttaggaaacactctgtttgtaatgtctgcaagtggatattcagacctctttgaggccttcgttggaaacgggatttcttcatattctgctagacagaagaattcccagtaacttccttgtgttgtgtgtgttcaactcacagagttgaactttcatttacacagagcagatttgaaacactctttttgtggaatttgcaagtggagatttcaagcgctttgaggccaaaggcggaaaaggaaatatcttcgtttcaaaactagacagaatcattcccagaaactgctctgcgatgtgtgcgttcaactctcagagtttaacttttcttttcattcagcagtttggaaacactctgtttgtaaagtctgcacgtggatattttgaccacttagaggccttcgttggaaacgggtttttttcctgtaaggctagacagaagaattcccagtaacttccttgtgttgtgtacattcaactcacagagtggaacgttcccttagacagagcagatttgaaacactctttttgtgcaattggcaagtggtgatttcagccgctttgaggtcaatggtataaaaggaaatatcttcgtataaaaactagacagaatcattcccacaaactgcgttgtgatgtgttcgttcaactcacagagtttaacctttctgttcatagagcagttaggaaacactctgtttgtaaagtctgcaagtggatattcagacctctttgaggccttcgttggaaacgggatttcttcatattatgctagacagaagaattctcagtaacttccttgtgttgtgtgtattcaactcacagagttgaacgatcctttacacagagcggacttgaaacactctttttgtggaatttgcaagtggagatttcagccgcgttgaggtcaatggtagaaaagaaaatatcttcgtataaaaactagacagaatgattctcagaaactcctttgtgatgtgtgtgttcaactcacagagtttaacctttcttttcatagagcagttaggaaacactctgtttgtaaagtctgcaagtggatattcagacctctttgaggccttcattggaaacgggtttttttcatataaggctagacagaagaattcccagtaacttccttgtgttgtgtgtgttcaactcacagagttgaactttcatttacacagagcagatttgaaacactctttttgtggaatttgcaagtggagatttcaagcgatttgagaccaaaggcagaaaaggaaatatcttcgtttcaaaactagacagaatcattctcagaaactgctgtgtgatgtgtgcgttcaactctcagagtttaacttttcttttcattcagcggtttggaaacactctgtttgtaaagtctgcacgtggatattttgaccacttagaggccttcgttggaaacgggtttttttcatgtaaggctagacagaagaattctcagtaacttccttgtgttgtgtacattcaactcacagagttgaacgatcctttacacagagcagacttgtaacactctttttgtggaatttgcaagtggagatttcagccgctttgaagtcaaaggtagaaaaggaaatatcttcctataaaaactagacagaatgattgtcagaaactcctttgtgatgtgtgcgttcaactcacagagtttaacctttcttttcatagagcagttaggaaacactctgtttgtaaagtctgcaagtggatattcagacctctttgaggccttcgttggaaacgggatttcttcatactgtgctagacagaagaattctcagtaacttccttgtgttgtgtgtattcaattcacagagttgaacgatcctttacacagagcagacttgtaacactctttttgtggaaattgcaagtggagatttcagccgctttgaagtcaaaggtagaaaaggaaatatcttcctataaaaactagacagaatgattctcagaaacttctttgtgatgtgtgcgttcaactcacagagtttaacctttcttttcatagagcagttaggaaacactctgtttgtaaactctgcaagtggatattcagacctcttcgaggccttcgttggaaacgggatttcttcatactgtgctagacagaagaattcccagtaacttccttgtgttgtgtgtgttcaagtcacagagttgaactttcatttacacagagaagatttgaaacactctttttgtggaatttgcaagtggagatttcaagcgctttgaggccaaaggcagaaaaggaaatatcttcgtttcaaaactagacagaatcattctcagaaactgctctgcgatgtgtgcgttcaactctcagagtttaacttttcttttcattcagcagtttggaaacactctgtttgtaaagtctgcacgtggatattttgaccatttagaggctttcgttggaaacgggtttttttcttgtaaggctagacagaagaattcccagtaacttccttgtgttgtgtacattcaactcacagagttgaacgtttccttagagagagcagatttgaaacactctttttgtgcaattggcaagtggtgatttcagccgctttgaggtcaatggtagaaaaggaaatatcttcgtataaaaactagacagaatgattctcagaaactcctttgtgatgtgtgcgttcaactcacagagtttaccctttcttttcatagagcagttaggaaacactctgtttgtaaagtctgcaattggatattcagacatccttgaggctttcgttggaaacgggatttcttcatattctgctagaaagaagaattctcagtaacttccttgtgttgtgtgtattcaactcacagagttgaacgatcctttacacagagcagacttgaaacactctttttgtggaatttgcaagtggagatttcagccgctttgaagtcaatggtagaataggaaatatcttcctatagaaactagacagaatgattctcagaaactcctttgtgatgtgtgtgttcaactcacagagtttaacctttcttttcatagagcagttagtaaacactctgtttataaagtctgcaagtggatattcagacccctttgaggtcttcgttggaaacgggatttcttcatattatgctagacagaagaattcccagtaacttccttgtgttgtgtgtgttcaactcacagagttgaactttcatttacacagagcagatttgaaacactctttttgtggaatttgcaagtggagatttcaagcgctttgaggccaaaggcagaaaagggaatatcttcgtataaaaactagacagaatcattctcagaaactgctctgcgatgtgtgcgttcaactctcagagtttgacttttcttttcattcagcagtttggaaacactctgtttgtaaagtctgcacgtggatattttgaccacttagaggccttcgttggaaacgggtttttttcctgtaaggctagacagaagaattcccagtaacttccttgtgttgtgtacattcaactcacagagttgaacgttcccttagacagagcagatttgaaacactctttttgtgcaattggcaaatggagatttcaagcgctttaaggtcaatggcagaaaaggaaatatcttcgtttcaaaactagacagaatcattcccacaaactgcgttgtgatgtgttcgttcaactcacagagtttaacctttcttttcatagagcagttaggaaacagtctgtttgtcaattctgtaagtggatattctgacatcttgtggccttcgttggaaacgggatttcctcatactctgctagacagaagaattctcagtaacttccttgtgttgtgtgtattcgactcacagagttgaacgatcctttacacagagcatacttgaaacactctttttgtggaatttgcaagtggagatttcagccgctttgaggtcaatggtagaataggaaatatcttcctatagaaactagacagaatgattctcagaaactcctttgtgatgtgtgcgttcaactcacagagtttaacctttcttttcatagagcagttaggaaacactctgtttgtaaagtctgcaagtggatattcagacatctttgaggctttctttgaaatgggatttcttcatattctgctagacagaagaattcccagtaacttccttgtgttgtgtgtgttcaactcacagagttgaactttcatttacacagagcagatttgaaacactctttttgtggaatttgcaagtggagatttcaagcgctgtgaggccaaaggcagaaaaggaaatatcctcgtataaaaactagacagaatcattctcagaaactgctgcatgatgtgtgcgttcaactctcagagtttaacttttcttttcattcagcggtttggaaacactctgtttgtaaagtctgcacgtggatattttgaccacttagaggccttcgttggaaacgggttttttcatgtaaggctagacagaagaattcccagtaacttcccttgtgttgtgtgcattcaactcacagagttgaacgttcccttagacagagcagatttgaaacactctatttgtgcaatttgcaagtgtagttttcaagctctttaaggtcaacggcagaaaaggaaatatcttcgtttcaaaactagacagaatcattcccacaaactgcgttgtgatgtgttcgttcaactcacagagtttaacgtttcttttcatagagcatttaggaaacagtctgtttgtcaattctgtaagtggatattctgacatcttgtggccttcgttggaaacgggatttcttcatattctgctagacagaagaattctcagtaacttccttgtgttgtgtttattcaacacacagagttgaatgatcctttacacagagcagacttgaaacactctttttgtggaatttgcaagtggagatttcagccgctttgtggtcaatggtagaaaaggaaactatcttcatataaagactagacagaatgattctcagaaactcctttgtgatgtgtgcgttcaactcacggagtttaacctttcttttcatagagcagttaggaaacactctgtaaagtctgcaagtagatattcagacctctctgaggccttcgttggaaacgggatttcttcatattatgctagacagaagaattctcagtaacttccttgtgttgtgtgcattcaactcacagagttgaaagatcctttacacagagcagattagaaacaatatttttgtggattttgcaagcggagatttcagccactttgaggtcaatggtagaaaaggaaatatcttcataaaaaaactagacagaatcattctcagaaactgctgcgtgatgtgtgcgttcaactctcagagtttaacttttcttttcattcagcggtttggaaacactctgtttgtaaagtctgcacgtggaaattttgaccacttagaggccttcgttggaaacgggtttttttcatgtaaggctcgacagaagaattcccagtaacttccttgtgttgtgtacattcaactcacagagttgaacgttcccttacacagagcagatttgaaacactctttttgtgcaattggcaagtggagatttcaagcgctttaaggtcaatggcagaaaaggaaatatcttcgtttcaaaactagacagaatcattcccacaaactgcgttgtgatgtgtgcgttcaactcacagagtttaacttttcttttcatagagcagttaggaaacactctgtttgtaaagtctgcaagtggatattcagacctctttgaggccttcgttggaaacgggatttcttcatattctgctagacagaagaattctcagtaacttccttgtgttgtgtgtattcaactcacagagttgaacgatcctttacacagagcagacttggaacactgttcttgtggaatttgcaagtggagatttcagccgcgttgaggtcaatggtagaaaaggaaatatcttcgtataaaaactagacagaatgattctcagaaactcctttgtgatgtgtgcgttcaactcacagagtttaaccattcttttcatagagcagttaggaaacactctgtttgtaaagtctgcaagtggatattcagacctccttgaggccttcgttggaaacgggatttctttatattctgctagacagaaggattcccagtaacttccttgtgttgtgtgtgttcaactcacagagttgaactttcatttacaaagagcagatttgaaacactctttttgtggaatttgcaagtggagatttcaagcgctttgaggccaaaggcagaaaagtaaatatcttcgtataaaaactagacagaatcattctcagaaactgctctgcgatgtgtgcgttcaactctcagagtttaacttttcttttcattcagcagtttggaaacactctgtttgtaaagtctgcacgtggataatttggccacttagaggccttcgttggaaacgtgtttttttcatgtaaggctagacagaagaattcccagtaacttccttgtgttgtgtgcattcaactcacagagttgaacgttcccttagacagagcagatttgaaacagcctatttgtgcaatttgcaagtgtagatttcaagcgctttaaggtcaacggctgaaaaggaaatatcttcgtttcaaaactatacagaatgattctcagaaactcctttgtgatgtgtgcgttcaactcacagagtttaaccttacttttcatagagcagttaggaaacactctgtttgtaaagtctgcaagtggatattcagacctccttgaggccttcattggaaacgggatttcttcatgttctgctagacagaataattctcagtaacttccttgtgttgtgtgtattcaactcacagagttgcacgatcctttacacagagcagacttgaaacactctttttgtggaatttgcaagtggagatttcagccgctttgaggtcaatagtagaaaaggaaatatcttcgtagaaaaactacacagaatgattctcagaaactcctttgtgatgtgtgtgttcaactcactgagtttaacctttcttttcatagaacagttagtaaacactctgtttataaagtctgcaaatggatattcagacccatttgaggccttcgttggaaacgggatttcttcatattatgctagacagaagaattcccagtaacttccttgtgttgtgtgtgttcaactcacatagttgaactttcatttacacagagcagatttgaaacactctttttgtggaatttgcaaatggagatttcaagcgctttgaggccaaaggcagaaaagcaaatatcttcgtataaaaactagacagaatcattctcagaaactgctctgcgatgtgtgcgttcaactctcagagtttaacttttcttttcattcagcagtttggaaacactctgtttgtaaagtctgcacgtggatattttgaccacttagaggccttcgttggaaatgggtttttttcctgtaaggctagacagaagaattcgcagtaacttccttgtgttgtgtacattcaactcacagagttgaacgttcccttagacagagcagatttgaaacactctttttgtgcaattggcaagtggagatttcaagcgctttaaggtcaatggcagaaaaggaaatatcttcgtttcaaaactagacagaatcattcccacaaactgcgttgtgatgtgttcgttcaactcacagagtttaacctttctgttcatagagcagttaggaaacactctgtttgtaaagtctgtaagtggatattctgacatcttgtggccttcgttggaaacgggatttattcatattctgctagacagaagaattctcagtaacttccttgtgttgtgtgtattcaactcacagagttgaatgatcctttacacagaacagacttgaaacactctttttgtggaatttgcaagtggagatttcagccgctttgtggtcaatggtagaataggaaatatcttcctatagaaactagacagaatgattctcagaaaatcttttgtgatgtgtgcgttcaactcacagagtttaacttttcttctcatagagcagttaggaaacactctgtttgtaaagtctgcaagtggatattcagacctccttgaggccttcgttggaaacgggatttcttcatattctgccagacagaaggattcccagtaacttccttgtgttgtgtgtgttcaactcacagagttgaactttcatttacaaagagcagatttgaaacactctttttgtggaatttgcaagtggagatttcaagcgctttgaggccaaaggcagaaaaggaaatatcttcgtataaaaactagacagaatcattctcagaaactgctctgcgatgtgtgcgttcaactctcagagtttaacttttcttttcattcagcagtttggaaacaatctgtttgtaacgtctgcacgtgaataatttgaccacttagaggccttcgttggaaacgggtttttttcatgtaaggctagacagaagaattcccagtaacttccttgttttgtgtacattcaactcacagagttgaacgttcccttagatagagcagatttgaaacactctttttgtgcaattggctagtggtgatttcagccgctttgaggtcaatggtagaaaaggaaatatcttcgtataaaaactagacagaatgattctcagaaacttcattgtgatgtgtgcgttcaactcacagagtttaacctttcttttcatacagcagttaggaaacactctgtttgtaaactctgcaagtggatattcagacctctttgaggccttcgttggaaacgggaattcttcatactgtgctagacagaagaattctcagtaacttccttgtgttgtgtgtattcaactcacagagttgaaggatcctttacagagagcaggcttgaaacactctttttgtcgaatttgcaagtggagatttcagccgctttgaggtcaatggtagaataggaaatatcttcttatagaaactagacaaaatgattctcagaaacttctttgtgatgtgtgcgttcaactcacagagtttaacctttcttttcatagagcagttaggaaaccctctgtttgtaaactctgcaagtggatattcagaccactttgaggccttcgttggaaacgggatttcttcatactatgctagacagaagaattcccagtaacttccttgtgttgtgtgtgttcaactcacagagttgaactttcatttacacagagcagatttgaaacactctttttgtggaatttgcaaatggagatttcaagcgctttggggccaaaggcagaaaaggaaatatcttcgtataaaaactagacagaatcattctcagaaactgctctgcgatgtgtgcgttcaactctcagagtttaacttttcgtctcattcagcagtttggaaacactctgtttgtaaagtctgcacgtggataatttgaccacttagaggccttcgttggaaacgggtttttttcatgtaaggctagacagaagaattcccagtaacttccttgtgttgtgtacattcaactcacagagttgaacgttcccttagacagagcagatttgaaacactctttttgtgcaattggcaagtggagatttcaagcgcttgaggtcaatggcagaaaaggaaatatcttcgtttcaaaactagacagaatcattcccacaaactgcgttgtgatgggttcgttcaactcacagagtttaacctttcttttcatagagcagttaggaaacagtctgtttgtcaattctgtaagtggatattctgacatcttgtggccttcgttggaaacgggatttctttatattctgctagacagaataattctcagtaacttccttgtgttgtgtgtattcaactcacagagttgaacgatcctttacagagtgcaaacttgaaacactctttttgtggaatttgcaagtggagatttcagccgctttgaggtcaatgatagaataggaaatatcttcctatagaaactagacagaatgattctcagaaactcctttgtgatgtgtgtgttcaactcacagagtttaacctttcttttcattcagcagttaggaaacactctgtttgtaaagtctgcaagtggatattcagacctctttgaggccttcgttggaaacgggtttttttcatataaggctagacagaagaattcccagtaacttccttgtgttgtgtgtgttcaactcacagagttgaactttcatttacacagagcagatttgaaacactctttttgtggaatttgcaagtggagatttcaagcgctttgtggccaaaggcagaaaaggaaatatcttcgtataaaaactagacagaatcattctcagaaactgctgcgtgatgtgtgcgttcaactctcagagtttaacttttcttttcattcagaggtttggaaacactctgtttgtaaagtctgcacgtggatattttgaccacttagaggccttcgttggaaacgggttttttgcatgtaaggctagacagaagaattcccagtaacttccttgtgttgtgtgcattcaactcacagagttgaacgttcccttagacagagcagatttgaaacactctatttgtgcaatttgcaagtgtagatttcaagcgctttaaggtcaatggcagaaaaggaaatatcttcgtttcaaaactagacagaatcattcccacaaactgcgttgtgatgtgttcgttcaactcacagagtttaacctttctgttcatagagcagttaggaaacactgtgtaaagtctgtaagtggatattctgacatcttgtggccttcgttggaaacgggatttcttcatattctgctagacagaagaattctcagtaactgccttgtgttgtgtgtattcaactcacagagttgaacgatcctttacacagagcagacttgaaacactctttttgtggaacttgcaagtggagatttcagccgctttgaggtcaatggtagaataggaaatatcttcctatagaaactagacagaatgattctcagaaacttctttgtgatgtgtgcgttgaactcacagagtttaacctttcttttcatagagcagttaggaaacactctgtttgtaaactctgcaagtggatattcagacctctttgaggccttcgttggaaacgggatttcttcatactgtgctagacagaagaattttcagtaacttccttgtgttgtgtgtattcaactcacagagttgaacgatcctttacacagagcagacttgaaacactctttttgtggaaattgcaagtggagatttcagccgctttgaggtcaatggtagaaaaggaaatatcttcgtataaaaactagacacaatgattctcagaaactcctttgtgatgtgtgcgttcaactcacagagtttaacctttcttttcatagagcagttaggaaacactctgcttgtaaagtctgcatgtggatattcagacctctttgaggccttcgttggaaacgggtttttttcatataaggctagacagaagaattcccagtaacttccttgtgttgtgtacattcaactcacagagttgaacgttcccttagacagagcagatttgaaacactctttttgtgcaattggcaaatggagatttcaagcgctttaaggtcaatggcagaaaaggaaatatcttcgtttcaaaactagacagaatcattctcagaaactgctgcgtgatgtgtgcgttcaacactcatagtctaacttttcttttcattcagcggtttggaaacactctgtttgtaaagtctgaacgtgcatattttgaccacttagaggccttcgttggaaacgggtttttttcatgtaaggctagacagaagaattcccagtaacttccttgtgttgtgtccattcaactcacagagttgaacgttcccttagacagagcagatttgaaacactctatttgtgcaatttgcaagtgtagatttcaagcactttaaggtcaacggcagaaaaggaaatatcttcgtttcaaaactagacagaatcattcccacaaactgcgttgtgatgtgttcgttcaactcacagagtttaacctttctgttcatagagcagttaggaaacactctgtttgtaaagtctgcaagtggatattcagacctccttgaggccttcgttggaaacgggatttcttcatattctgctagacagaagaattcccactaacatccttgtgttgtgtgtgttcaactcacagagttgaactttcatttacacagagcagatttgaaacactctttttgtggaatttgcaaatggagatttcaagcgctttgaggccaaaggcagaaaaggaaatatcttcgtttcaaaactagacagaatgattctcagaaactcctttgtgatgtgtgcgtgcaactcacagagtttaacttttcttttcatagagcagttaggagacactctgtttgtaaagtctggaagtggatattcagacctccttgaggccttcgttggaaacgggatttcttcatattctgctagacagaagaattctcagtaacttcctcgtgttgtgtgtattcaacctcacagagttgaacgatcctttacacagagcagacttgaaacacactttttgtggaatttgcaagtggagatttcagccgctttgaggtcaatggtagaaaaggaaatatcttcgtataaagactagacagaatcattcccacaaactgcgttgtgatgtgtgcgttcaagtcaaagagtttaacctttcttttcatagagcagttaggaaacactctgtttgtaaagtctgcaagtggatattcagacctccttgaggccttcgttggaaacgggatttcttcatattctgctagacagaagaattctcagaaacttccttgtgttgtgtgtattcaactcacagagttgaacgatcgtttacacagagtagacttgagacactctttctgtggaatttgcaagtggagatttcagccgctttgaggtcaatggtagaaaagtaaatatcttcgtataaagactagacagaacgattctcagaaactcctttgtgatttgtgcgtacaactcacagagtttaacctttcttttcatagagcagttaggaaacactctctttgtaaagtctgcaagtggatattcagacctctttgaggccttcgttggaaacgggatttcttcatattctgctagacagaagaattctcagtaacttccttgtgttgtgtttattcaactgacagagttgaactttcatttagagagagcagatttgaaacactgtttttgtggaatttgcaagtggagatttcaagctttggggccaaaggcagaaaaggaaatatcttcgtataaaaactagacagaatcattctcagaaactgctgcgtgatgtgtgcgttcaactctcagagtttaacttttcttttcattcagcggtttggaaacactctgtttgtatagtctgcacgtggatattttgaccacttagaggccttcgttggaaacgggtttttttcatgtaaggctagacagaagaattcccagtaacttccttgtgttgtgtgcattcaacccacagagttgaacgttcccctagacagagcagatttgaaacactctatttgtgcaatttgcaagtgtagttttcaagctcttttaggtcaacggcagaaaaggaaatatcttggtttcaaaactagacagaatcattcccacaaactgcgttgtgatgtcttcgttcaacacacagagtttaacctttcttttcatagagcagttaggaaacagtctgtttgtaaattctgtaagtggatattctgacatcttgtggccttcgttggaaacgggatttcttcatattctgctagacagaagaattctcagaatcttccttgtgttgtgtgtattcaactcacagaggtgaacggtcctttacacagagcagacttgaaacactctttttgtggaatttgcaagtggagatttcagccgctttgaggtccatggtagaaaaggaaatatcttcgtataaaaactagacagaatgattctcagaacctcctttgtgatgtgtgcgttcaactcacagagtttaacctttcttttcatagagcagttaggaaacactctgtttgtaaagtctgcaagtggatattcagacatccttgaggctttcgttggaaacgggatttcttcatattctgctagaaagaagaattctcagtaacttccttgtgttgtgtgtattcaactgacagagttgaactttcatttagagagagcagatttgaaacactgtttttgtggaatttgcaagtggagatatcaagcgccttggggccaaaggcagaaaaggaaatatcttcgtttaaaaagtagacagaatgattctcagaaactcctttgtgatgtgtgcgttcaactcacagagtttaacttttcttttcatagagcagttaggaaacactctgtttgtaaagtctgcaagtggatattcagacctctttgaggccttcgttggaaacgggatttcttcatattttgctagacagaagaattcccagtaacttccttgtgttgtgtgcactcaactcacagagttgaacgttcccttagacagagcagatttgaaacactctatttgtgcaatttgcaagtggagatttcaagcgctttatggtcaatggaagaaaaggaaatatcttcgtttcaaaactagacagaatgattctcagaaacttctttgtgatgtgtgcgttcaactcacagagtttaacctttcttttcatagagcagttaggaaacactctgtttgtaaactctgcaagtggatattcagacctctttgaggccattgttggaaacgggatttcttcatactatgctagacagaagaattctcagaatcttccttgtgttgtgtgtattcaactcacacagttgaacgactgtttacacagagcagatgtgaaacactctttttgtggaatttgcaagtggagatttcagccgctttgaggtcaatggtagaaaaggaaatatcttcgtataaaaactagacagaatgattctcagaaacttctttgtgatgtgtgcgttcaactcacagagtttaacctttcttttcatagagcagttaggaaacactctgtttgtaaactctgcaagtggatattcagacctctttgaggccttcgttggaaacgggatttcttcatactgtgctagacagaagaattctcagtaacttccttgtgttgtgtgtattcaactcacagagttgaacgatcctttacacagagcggacttgaaacactctttttgtggaatttgcaagtggagatttcaggcgcgttgaggtcaatggtagaaaaggaaatatcttcgtataaaaactagacagaatcattctcagaaaatgctctgtgatgtgtgcgttcaactctcagagtttaacttttcttttcattcagcactttggaaacactctgtttctaaagtctgcacgtggatattttgaccacttagaggtctttgttggaaacgggtttttttcacgtaaggctagacagaagaattcccagtaacttccttgtgttgtgtacattcaactcacagagttgaacgttcccttagacagagcagatttgaaacactctttttgtgcaattggcaaatggagatttcaagcgctttaaggtcaatggcagaaaaggaaatatcttcgtttcaaaactagacagaatgattctcagaaaattctttgtgatgtgtgcatcaaatcacagagtttaacctttcttttcatagagcagttaggaaacactctgtttgtaaactctgcaagtggatattcagacctctttgaggccttcgttggaaacgggatttcttcatactgtgctagacagaagaattctcagtaacttccttgtgttgtgtgtattcaactcacagagttgaacgatcctttacacagagcagacttgaaacgctctttttgtggaatttgcaagtggagatttcagccgcgttgaggtcaatggtagaaaaggaaatatcttcgtataaaaactagacagaatgattctcagaaactcctttgtgatgtgtgctgttcaactcacagagtttaacctttcttttcatagagcagttaggaaacactctgtttgtaaagtctgcaagtggatattcagacctctttgaggccttcgttggaaacgggtttttttcatataaggctagacagaagaattctcagtaacttccttgtgttgtgtgtattcaactgacagagttgaactttcatttagagagagcagatttgaaacactgtttttgtggaatttgcaaatggagatttcaagcgctttggggccaaaggcagaaaaggaaatatcttcgtataaaaactagacagaatcattctcagaaactgctgcgtgatgtgtgcgttcaactctcagagtttaacttttcttttcattcagcggtttggaaacactctgtttgtaaagtctgcacgtggaaattttgaccacttagaggccttcgttggaaacgggtttttttcatgtaaggctagacagaagaattcccagtaacttccttgtgttgtgtgcattcaactcacagagttgaacgttcccttagacagagcagatttgaaacactctatttgtgcaatttgaaagtgtagatttcaagcgctttaaggtcaacggcagaaaaggaaatatcttcgtttcaaaactagacagaatgattctcataaactcctttgtgatgggtgcgttcaactcacagagtttaacctttcttttcatagagcagttaggaaacactctgtttgaaaagtctgcaagtggatattcagacctccttgaggccttcgttggaaacgggatttcttcatattctgctagacagaagaattctcagtaacttccttgtgttgtgtttattcaactcacagagttgaatgatcctttacacagagcagacttgaaacactctttttgtggaatttgcaagtggagatttcagccgctttgaggtcaatggtagaataggaaatatcttcgtataaagactagacagaatgattctcagaaactcctttgtgatgtgtgcgttcaactcacagagtttaacctttcttttcatagagcagttaggaaacactctgtttgtaaagtctgcaagtggatattcagacctccttgaggccttcgttggaaacaggatttcttcatattctgctagacagaagaattctcagtaacttctttgtgttgtgtgtattcaactcacagagttgaacgatcctttacacagagcagacttgaaacactctttttgtggaatttgcaagtggagattacagccgctttgacgtcaatggtagaaaaggaaatatattcgtataaagactagacagaatcattctcagaaactactctgtgatgtgtgcgttcaactctccgagtttaacttttcttttcattcagtagtttggaaacactctgtttgtaaatctgcacgtggatattttgacgacttagaggctttcgttggaaacgggtttttttcatgtaaggctagacagaagaattcccagtaacttccttgtgttgtgtgcattcaactcacagagttgaacgttcccttagacagaacagatttgaaacactctatttgtgcaatttgcaagtgtagatttcaagcgctttaaggtcaatggcagaaaaggaaatatcttcgtttcaaaactagacagaatcattcccacaaactgcgttgtgatgtgctcgttcaactcacagagtttaacctttctgttcatagagcagttaggaaacactctgtttgtaaagtctgcaagtggatattcagacctccttgaggccttcgttggaaacgggatttcttcatattctgctagacagaataattctcagtaacttccttgtgttgtgtgtattcaactcacagagttgtacgatcctttacacagagcagacttgaaacactctttttgtggaatttgcaagtggagatttcagccgctttgaggtcaatggtagaaaaggaaatatcttcgtataaagactagacagaatgattctcagaaactcctttgtgatgtgtgcgttcaactcacagagttcaacctttcttttcatagagcagttaggaaacactctgtttgtaaagtctgcaagtggatattcagacctccttgaggccttcgttggaaacgggatttcttcatattatgctagacagaagaattctcagtaacttccttgtgttgcgtgtattcaactcacagagttgaacgatcctttacacagagcagacttgaaacactctttttgtggaatttgcaagtggagatttcagccgctttgaggtcaatggtagaataggaaatatcttcctatagaaactagacagaatcattctcagaaactgctgcgtgatgtgtgcgttcaactctcagagtttaacttttcttttcattcagcggtttggaaacactctgtttgtaaagtctgcacgtggaaattttgaccacttagaggccttcgttggaaacgggtttttttcatttaaggctagacagaagaattcccagtaacttccttgtgttgtgtgcattcaactcacagagttgaacgttcccttagacagagcagatttgaaacactctatttgtgcaatttgcaagtgtagatttcaagcgctttaaggtcaacggcagaaaaggaaatatcttcgtttcaaaactagacagaatcattcccacaaactgcgttgtgatgtgttcgttcaactcagagtttaacctttctgttcatagagcagttaggaaacactctgtttgtaaagtctgtaagtggatattctgacatcttgtggccttcgttggaaacgggatttcttcatattctgctagacagaagaattctcagtaacttccttgtgttgtgtgtattcaactcacagagttgaacgatcctttacacagagcagacttgtaacactctttttgtggaatttgcaagtggagatttcagccgctttgaagtccaaggtagaaaaggaaatatcttcctataaaaactagacagaatgattctcagaaactcctttctgatgtgtgcgttcaactcgcagagtttaacttttcttttcatagagcagttaggaaacactctgtttgtaaagtctgcaagtggatattcggacctctttgaggccttcgttggaaacgggaattcttcatattatgctagacagaagaattcccagtaacttccttgtgttctgtgtgttcaactcacagagttgaactttcatttacacagagcagatttgaaacactctttttgtggaatttgcaagtggagatttcaagcgctttgaggccaaaggcagaaaaggaaatatcttcgtttcaaaactagacagaatcattctcagaaactgctgcgtgatgtgtgcgttcaactctcagagtttaacttttcttttcattcagcggtttggaaacactctgtttgtaaagtctgcacgtggaaattttgaccacttagaggccttcgttggaaacgggtttttttcatgtaaggctagacagaagaattcccagtaacttccttgtgttgtgtgcattcaactcacagagttgaacgttccattagacagagcagatttgaaacactctatttgtgcaatttgcaagtgtagatttcaagcgctttaaggtcaatggcagaaaaggaaatatcttcgtttcaaaactagacagaatgattctgagaaactcctttgtgatgtgtgcgttcaactcacagagtttaacttttcttttcatagagcagttaggaaacactctgtttgtaaagtctgcaagtggatattcagacctccttgaggccttggttggaaacgggatttcttcatattatgctagacagaataattctcagtaacttccttgtgttgtgtgtattcaactcacagagttgaacgatcctttacagagagcagagttgaaacactctttttgtggaatttgcaagtggagatttcagccgctttgaggtcaatggtagaaaaggaaatatctttgtataaagactagacagaatgattctcagaaactcctttgtgatgtgtgcgttcaactcacagagtttaacttttcttttcatagagcagttaggaaacactctgtttgtaaagtctgcaagaggatattcagacctctttaaggccttcgttggaaaagggatttcttcatattctgctagacagaagaattctcagtaacttccttgtgttgtgtgtattcaactgacagagttgaactttcatttagagagagcagatttgaaacactgtttttgtggaatttgcaagtggagatttcaagcactttggggccaaaggcagaaaacgaaatatcttcgtataaaaagtagacagaatcattctcagaaactgctgcgtgatgtgtgcgttcaactctcagactttaacttttcttttcattcagcggtttggaaacactctgtttgtaaagtctgcacgtggatattttgaccacttagaggccttcgttggaaacgggtttttttcatgtaaggctagacagaagaattcccagtaacttccttgtgttgtgtacattcaactcacagagttgaacgttcccttagacagagcagatttgaaacactctttttgtgcaattggcaaatggagatttcaagcgctttaagttcaatggcagaaaaggaaatatcttcgtttcaaaactagacagaatcattcccacaaactgcgttgtgatgtgttcgttcaactcacagagtttaacctttccgttcatagagcagttaggaaacactctctaaagtctgtaagtggatattcagatctccttgaggtcttcgttggaaacgggatttcttcatattctgctagacagaagaattctcagtaactttccttgtgttgtgtgtattcaactcacagagttgaacgatcctttacacagagcagacttgtaacactctttttgtggaatttgcaagtggagatttcagccactttgaagtcaaaggtagaaaaggaaataacttcctataaaaactagacagaatgattctcagaaactcctttgtgatgtgtgcgttcaactcacagagtttaacctttcttttcatagagcagttaggaaacactctgtttgtaaagtctgcaagtggatattctgacctctttgaggccttcgttggaaacgggtttttttcatataaggctagacagaagtaatctcagtaacttccttgtgttgtgtgtattcaactgacagagttgaaatttcatttagagggagcagatttgaaacactgtttttgtggaatttgcaagtggagatttcaaacgctttggggccaaaggcagaaaaggaaacatcttcgtataaaaactagacagaatcattctcagaaactgctgcgtgatgtgtgcgttcaactctcagagtttaacttttcttttcattcagcggtttggaaacactctgtttgtaaagtctgcacgtggaaattttgaccacttagaggccttcgttggaaacgggattttttcatgtaaggctagacagaagaattcccagtaacttccttgtgttgtgtgcattcaactcacagagttgaacgttcccttagacagagcagatttgaaacactctatttgtgcaatttgcaagtgtagttttcaagctctttaaggtcaacggcagaaaaggaaatatcttcgtttcaaaactagaccgaatcattcccacaaactgcgttgtgatgtgttcgttcaactcacagagtttaacctttctgttcatagagcagttaggaaatactctgtttgtaaagtctgcaagtggatattcagacctccttgaggccttcgttggaaacgggatttcttcatattctgctagacagaataattctcagtaactttccttgtgttgtgtgtattcaactcacagagttgaacgatcctttacacagagcagacttgaaacactctatttgtagaatttgcaagtggagatttcagccgctttgaggtcaatagtagaaaaggaaatatcttcgtagaaaaactagacagaatgattctcagaaactcctttgtgatgtgtgcgttcaactcacagagtttaacctttcttttcatagagcagttaggaaacactgtgtttgtaaagtctgcaagtggatattcagacctccttgaggccttcgttggaaacgggatttcttcatattatgctagacagaagaattctcagtaacttccttgtgttgtgtgtattcaactcacagagttgaacgatcctttacacagagcatacttgaaacactcttcttgtggaatttgcaagtggagatttcagccactttgaggtcaatggtagaataggaaatatcttcctatagaaactagacagaatgattctcagaaactcctttgtgatgtgtgtgttcaactcacagagtttaacctttcttttcatacagcatttagtaaacactctgtttataacgtctgcaagtggatattcagacccctttgaggccttcgttggaaacgggatttcttcatattatgctagacagaagaattcccagtaacttccttgtgttgtgtgcattcaactcacagagttgaacgttcccttagacagagcagatttgaaacactctatttgtgcaatttgcaagtgtagatttcaagcgctttaaggtcaacggcagaaaaggaaatatcttcgtttcaaaactagacagaatcattaccacaaactgcgttgtgatgtgttcgttcaacccacagagtttaagctttctcttcatagagcagttaggaaacactctgtttgtgaagtctgtaagtggatattctgacatcttgtggccttcgttggaaacgggatttcttcatattctgctagacagaagaattctcagaatcttccttgtgttgtgtgtattcaactcacagagttgaacgatcctttacacagagcagacttgaaacactctttttgtggaatttgtaagtggagatttcagccgctttgaggtccatggtagaaaaggaaatatcttcgtataaaaactagacagaatgattctcagaaactcctttgtgatgtgtgcattcaactcacagagttcaacctttcttttcatagagcagttgggaaacactctgtttgtaaagtctgcaagtggatattcagacttctttgaggccttcgttggaagcgggatttcttcatgttctgctagacagaagaattcccagtaacttcccttgtgttggctgtgttcaactcacagagttgaactttcatttacacagagcagatttgaaacactctttttgtggaatttgcaaatggagatttcaagcgctttgaggccaaaggcagaaaaggaaatatcttcgtataaaaactcgacagaatcattctcagaaactgctctgcgatgtgtgcgttcaactctcagagtttaacttttcttttcattcagcagtttggaaacactctgtttgtaaagtctgcacgtggataacttgaccacttagaggccttcgttggaaacgggtttttttcatgtaaggctagacagaagaattcccagtaacttccttgtgttgtgtgcattaaactcacatagttgaacgtttccttagacagagctgaattgaaacacgctatttgtgcaatttgcaagtgtagatttcaagcgctttaaggtcaatggcagaaaaggaaatatcttcgtttcaaaactagacagaatcattcccaaaaactgcgttatgatgtgttcgttcatctcacagagtttaacctttcttttcatagagcagttaggaaacagtctgtttgtaaattctgtaagtggatattctgacatcttgtggccttcgttggaaacgggatttcttcatattctgctagacagaagaattctcagtaacttccttgtgttgtgtgtattcaactcacagagttgaacgatcatttacacagagcagacttgaaacactctttttgtggaatttgcaagtggagatttcagccgctttgaggtcaatggtagaaaaggaaatatcttcgtataaagactagacagaacgattctcagaaactcctttgtgatgtgtgcgttcaactcacagagtttaacctttcttttcatagagcagttaggaaacactttgtttgtaaagtctgcaagtggatattcagacctctttgaggccttcgttggaaacgggatttcttcctattctgctagacagaagaattctcagtaacttccttgtgttgtgtgtattcaactcacagagttgaacgatcctttacacagagcagagttgaaacactctttttgtggaatttgcaagtggagatttcagccgctttgaggtcaatagtagaaaaggaaatatcttcgtagaaaaactagacagaatcattctcagaaagtgctctgcgatgtgtgcgttcaactctcagagtttaactttgcttttcattcagcagtttggaaacactctgtttgtaaagtctgcacgtggataatttgaccacttagaggccttcgttggaaacgggtttttttcatgtaaggctagacagaagaattcccagtaacttccttgtgttgtgtacattcaactcacagagttgaacgttcccttagacagagcagatttgaaacactctttttgtgcaattggcaagtggagatttcaagcgctttgaggtcaatggcagaaaaggaaatatcttcgtttcaaaactagacagaatcattcccacaaactgcgttgtgatgtgttcgttcaactcacagagtttaacctttcttttcatagagcagttaggaaacagtctgtttgaaaattctgtaagtggatattctgacatcttgtggccttcgttggaaacgggatttcttcatattactgctagacagaagaattctcagtaacttccgcgtgttgtgtgtattcaactcacagagttgaacgatcctttacacagagcagacttgaaacactctttttgtggaatttgcaagtggagatttcagccgctttgaggtcaatggtagaaaaggaaataccttcctataaaaactagacagaatgattctcagaaactcctttgtgatgtgtgcgttcaactcacagagtttaacctttcttttcatagagcagttaggaaacactctgtttgtaaagtctgcaagtggatattcagacctctttgaggccttcgttgaaaacgggatttcttcatattctgctagggagaagaattctcagtaacttccttgtgttgtgtgtattcaactgacagagttgaactttcatgtagagagagcagatttgaaacactgtttttgtggaatttgcaagtggagatttcaagcgctttggggccaagggcagaaaaggaaatatcttcgtataaaaactagacagaatcattctcagaaactgctctgcgatgtgtgcgttcaactctcagagtttaacttttcttttcattcagcagtttggaagcactctgtttgtaaagtctgcacgtggataatttgaccacttagaggccttcgttggaaacgggtttttttcatataaggctagacagaagaattcccagtaacttccttgtgttgtgtgcattcaactcacagagttgaacgttcccttagacagagcagatttgaaacactctatttgtgcaatttgcaagtgtagatttcaagcgctttaaggtcaatggcagaaaaggaaatatcgtcgtttcaaaactagacagaatgattctcagaatctcctttgtgatgtgtgcgttcaactcacagagttcaacctttcttttcatagagcagttgggaaacactctgtttgtaaagtctgcaagtggatattcagacttctttgaggccttcgttggaagcgggatttcttcatgttctgctagacagaagaattctcagtaacttctttgtgttgcgtgtattcaactcacagagttgaacgatcctttacacagaggagacttgaaacactctttttgtggaatttgcaagtggagattacagccgctttgaggtcaatggtagaaaaggaaatatcttcgtataaagactagacagaatgattctcagaaactcctttgtgatgtgtgcgttcaactcacagagcttaacctttcttttcatagagcagttaggaaacactctgtttgtaaagtctgcaagtggatattcagacacctttgaggccttcgttggaaacgggatttcttcatgttctgctagacacaagaattcccagtaacttccttgtgttgtgtgtgttcaactcacagagttgaactttgatttacacagagcagatttgaaacactctttttgtggaatttgcaagaggagatttcaagcgctttgaggccaaaggcagaaaaggaaatatcttcgtataaaaactagacagaatcattctcagaaactgctctgcgatgtgtgcgttcaactctcagagtttaacttctcttttcattcagcagtttggaaacactctgtttgtaaagtctgcacgtggataacttgaccacttagaggccttcgttggaaacgggtttttttcatgtaaggctagacagaagaattcccagtaacttccttgtgttgtgtacattcaactcacagagttgaacgatcccttagtcagagcagatttgaaacactctttttgtgcaattggcaagtggagacttcaagcgctttaaggtcaatggcagaaaaggaaatatcttcgtttcaaaactagacagaatcattcccacaaactgcgttgtgatgtgttcgttcatctcacagagtttaacctttcttttcatagagcagttaggaaacagtctgtttgtaaattctgtaagtggatattctgacatcttgtggccttcgttggaaacgggatttcttcatattctgctagacagaaataattctcagtaacttccttgtgttgtgtgtattcaactcacagagttgaacgatcctttacagagagcagacttgaaacactctttttgtggaatttgcaagtggagatttcagccgctttgaggtcaatggtagaataggaaatatcttccaatagaaactagacagaatgattctcagaaactcctttgtgatgtgtgtgttcaactcacagagtttcacctttcttttcatagagcagttaggaaacactctgtttgtaaagtctgcaagtggatattcagacctccttgaggccttcgttggaaacgggatttcttcatattctgctagacagaagaattcccagtaacttccttgtgttgtgtgtgttcaactcacagagttgaactttcatttacccagagcagatttgaaacactctttttgtggaatttgcaagtggagatttcaagcgctttgagaccaaaggcagaaaaggaaatatcttcgtttcaaaactagacagaatcattctcataaactgctctgcgatgtgtgcgttcaactctcagagtttaacttttcttctcattcagcagtttggaaacactctgtttgtaaagtctgcacgtggataatttgaccacttagaggccttcgttggaaacgggtttttttcatgtaaggctagacagaagaattcccagtaacttccttgtgttgtgtacattcaactcacagagttgaacgttcccttagacagagtagatttgaaacactctttttgtgcaactggcaaatggagatttcaagcgctttaaggtcaatggcagaaaaggaaatatcttcgtttcaaaactagacagaatgattctcatgaactcctttgtgatgtgtgcgttcaactcacagagtttaacctttgttttcatagagcagttaggaaacactctgtttgtaaagtctgcaagtggatattcagacctccttgaggccttttttggaaacgggatttcttcatattctgctagacagaagaattctcagtaacttccttgtgttgtgtgtattcaactcacagagttgaatgatcctttacacagaacagtcttgaaacactctttttgtggaatttggaagtggagatttcagccgctttgaggtcaatggtagaataggaaatatcttcctatagaaactagacagaatgattctcagaaactcctttgtgatgtgggcgttcaactcacagagtttaacctttcttttcatagagcagttaggaaacactctgtttgtaaagtctgcaagtggatattcagacatctttgaggctttcgttggaaacgggatttcttcatattctgatatacagaagaattctcagaaacttccttgtgttgtgtgtattcaactcacagagttgaacgatcgtttacacagagcagacttgagacactctttttgtggaatttgtaagtggagatttcagccgctttgaggtcaatggtagagaaggaaatatcttcatataaaaactagacagaatcattctcagaaactactctgcaatgtgtgcgttcaactctcagagtttaactcttcttttcattcagcagtttggaaacactctgtttgtaaactctgcacgtggatattttgaccacttagaggccttcgttggaaacgggtttttttcctgtaaggctagacagaagaattcccagtaacttccttgtgttgtgtgcattcaactcacagagttgaacgttcccttagacagagcagatttgaaacactctatttgtgcaatttgcaagtgtagttttcaagctctttaaggtcaacggcagaaaaggaaatatcttcgtttcaaaactagacagaatcattcccacaaactgcgttgtgatgtgttcgttcaactcacagagtttaacctttcttttcatagagcagttaggaaacagtctgtttgtaaattctgtaagtggatattctgacatcttgtggccttcgttggaaacgggatttcttcatattctgctagacagaagaattctcagtaacttccttgtgttgtgtgtattcaactcacagagttgaacgatcctttacacagagcagacatgaaacactctttttgtggaatttgcaagtggagatttcagccgctttggggtcaatggtagaaaaggaaatatcttcgtataaagactagacagaatgattctcagtaactcctttgtgatgtgtgcgttcaactcacagagtttaacctttcttttcatagagcagttaggaaacactctgtttgtaaagtctgcaagtggatattcagacctctttgaggccttcgttggaaacgggtttttttcatataaggctagacagaagaattcccagtaacttccttgtgttgtgtgtgttcaactcacagagttgaactttcatttacacagagcagatttgaaacactctttttgtggaatttgcaagtggagatttcaagcgctttgaggccaaaggcagaaaaggaaatatcttcgtttaaaaactagacagaatcattctcagaaactgctctgcgatgtgtgcgttcaactctcagagtttaacttttcttttcattcagcagtttggaaacactctgtttgtaaagtctgcacgtggatattttgaccatttagaggccttcgttggaaacgggtttttttcctgtaaggctagacagtagaattcccagtaacttccttgtgttgtgtacattcaactcacagagttgaacgttccctaagacagagcagatttgaaacactctttttgtgcaattggcaagtggttatttcagccgctttgaggtcaatggtagaaaaggaaatatcttcgtataaaaactagacagaatgattctcagaaactcctttgtgatgtgtgcgttcaactcacacagtttaacctttcttttcatagagcagttaggaaacactctgtttgtaaagtctgcaagtggatattcagacctccttgaggccttcgttggaaacgggatttcttcatattatgctagaaagaagaattctcagaaacttcgttgtgttgcgtgttttcaactcacagagttcaacgatcctttacacagagtagacttgaaacactctttttgtggaatttgcaagtggagatttcagccgcttagaggtcaatggtagaaaaggaaatatcttcgtataaaaactagacagaatgattctcagaaactcctttgtgatgtgtgcgttcaactcacagagttcaacctttcttttcatagagcagttgggaaacactctgtttgtaaagcctgcaagtggatattcagacttctttgaggccttcgttggaagcgggatttcttcatattctgctagacagaagaattcccagtaacttccttgtgttgtgtgtgttcaactcacagagttgaacgttccctcagacagagcagatttgaaacactctttttgtggaatttgcaagtggagatttcaagcgctttgaggccaaaggcagaaaaggaaatatcttcgtataaaaactagacagaatcattctcagaaactgctctgcgatgtgtgcgttcaactctcagagtttaacttttcttttcattcagcagtttggaaacactctgtttgtaaagtctgcacgtggataatttgaccacttagaggccttcgttggaaacgggtttttttcatgtaaggctagacagaagaattcccagtaacttccttgtgttgtgtgcattcaactcacagagttgaacgttcccttagacagagcagatttgaaacactctatttgtgcaatttgcaagcgtagatttcaagcgctttaaggtcaatggcagaaaaggaaatatcttcgtttcaaaactagacagaatcattcccacaaactgcgttgtgatgtgttcgttcaactaacagagtttaacctttctgttcatagagcagttaggaaacactctgtttgtaaagtctgtaagtggatattctgacatcttgtggccttcgttggaaacgggatttcttcatattctgctagacagaagaattctcagtaacttccttgtgttgtgtgtattcaactcacagagttgaaggatcctttacagagagcaggcttgaaacactctttttgtggaatttgcaagtggagatttcagccgctttgaggtcaatggtagaataggaaatatcttcttatagaaactagacagaatgattctcagaaactcctttgtgatgtgtgtgttcaactcacagagtttaacctttcttttcatagagcagttagtaaacactctgtttataaagtctgcaagtggatattcagacccctttggggccttcgttggaaacgggatttcttcatattatgctagacagaagatttcccagtaacttccttgtgttgtgtgttttcaactcacagagttgaactttcatttacacagagcagatttgaaacacactttttgtggaatttgcaaatggagatttcaagcgctttgaggccaaaggcagaaaaggaaatatcttcgtttcaaaactagacagaatcattctcagaaactgctctgcgatgtgtgcgttcaactctcagagtttaaattttcttttcattcagcagtttggaaacactctgtttgtaaagtctgcacgtggatattttgaccacttagaagccttcgttggaaacgggtttttttcctgtaaggctagacagaagaattcccagtaacttccttgtgttgtgtacattcaactcacagagttgaacgtttccttagacagagcagatttgaaacactctttttgtgcaattggcaagtggagatttcaagcgctttaaggtcaatggcagaaaaggaaatatcttcgtttcaaaactagacagaatcattcccacaaactgcgttgtgatgtgtacgttcaactcacagagtttaacctttctgttcatagagcagttaggaaacactctgtttgtaaagtctgtaagtggatattctgacatcttgtggccttcgttggaaacgggatttcttcatattctgctagacagaataattctcagtaacttccttgtgttgtgtgtattcaagtcacagagttgaacgatcctttacagagagcagacttgaaacactctttttgtggaatttgcaagtggagatttcagccgctttgaggtcaatgttagaaaaggaaatatcttcgtataaagactagacagaatgattctcagaaactcctttgtgatgtgtgcgttcaactcacagagttcaacctttcttttaatagagcagttgggaaacactctgtttgtaaagtctgcaagtggatattcagacttctttgaggccttcgttggaagcgggatttcttcatattcggctagacagaagaattctcggtaacttccttgtgttgtgtgtattcaactcacagagttgaacgatcctttacacagagcggacttgaaacactctttttgtggaatttgcaagtggagatttcagccgcgttgaggtcaatggtagaaaaggaaatatcttcgtataaaaactagacagaatgattctcagaaactcctttgtgatgtgtgcgttcaactcacagagttcaacctttcttttcatagagcagttaggaaacactctgtttgtaatgtctgcaagtggatattcagacctccttgaggccttcgttggaaacgggatttcttcatattatgctagacagaagaattctcagtaacttccttgtgttgtgtgtattcaactgacagacttgaactttcatttagagagagcagatttgaaacactgtttttgtggaatttgcaagtggagatttcaagcgctttggggccaaaggcagaaaaggaaatatcttcgtataaaaagtagacagaatcattctcagaaactgctctgcgatgtgtgcgttcaactctcagagtttaacttttcttttcattcagcagtttggaaacactctgtttgtaaggtctgcacgtggataatttgaccacttagaggccttcgttggaaacgggtttttttcatgtaaggctagacagaagaattcccagtaacttccttgtgttgtgtgcattcaactcacagagttgaacgttcccttagacagagcagatttgaaacactctatttgtgcaatttgcaagtgtagatttcaagcgctttaaggtcaatggcagaaaaggaaatatcttcgtttcaaaactagacagagtgattctcagaaactcctttgtgatgtctgcgttcaactcacagagtttaacgtttcttttcatagagcagttaggaaacactctgtttgtaaagtctgcaagtggatatacagacctccttgaggccttcgttggaaacgggatttcttcatattctgctatacagaagaattctcagaaacttccttgtgttgtgtgtattcaactcacagagttgaacgatcctttacacagaacagacttgagacactctttttgtggaatttgcaagtggagatttcagccgctttgaggtcaatggtagaaaaggaaatatcttcgtataaaaactagacagaatgattctcagaaactcctttgtgatgtgtgcgttcaactcacagagtttaacctttcttttcatagagcagttaggaaacactctgtttgtaaagtctgcaagtggatattcagacatccttgaggctttcgttggaaacgggatttcttcctattctgctagaaagaagaattcccagtaacttccttgtgttgtgtgtgttcgactcacagagttgaactttcatttacacagagcagatttgaaacactctttttgtggaatttgcaagtggagatttcaagcgctttgaggccaaaggcagaaaaggaaatatcttcgtttcaaaactaggcagaatcattctcagaaactgctctgcgatgtgtgcgttcaactctcagagtttaacttttcttttcattcagcagtttggaaacactctgtttgtaaagtctgcacgtggatattttgaccacttagaggccttcgttggtaacgggtttttttcctgtaaggctagacagaagaattcccagtaacttccttgtgttgtgtgcattcaactcacagtagttgaacgttcccttagacagagcagatttgaaacactctatttgtgcaatttgcaagtgtagttttcaagctctttaaggtcaacggcagaaaaggaaatatcttcgtttcaaaactagacagaatgattctcataaactcctttgtgatgtgtgcgttcaactcacagagtttaacttttcttttcatagagcagttaggaaacactctgtttgtaaagtctgcaagtggatattcagacctctttgaggccttcgttggaaacgggatttcttcatattatgctagacaaaataattctcagtaacttccttgtgttgtgtgtattcaactcacagagttgaacgatcctttacacagagcagacttgaaacactctttttgtggaatttgcaagtggagatttcatccaatttgaggtcaatagtagaaaaggaaatatcttcgtagaaaaactagacagaatgattctcagaaactcctttgtgatgtgtgcgttcaactcacagagtttaacctttcttttcatagagcagttaggaaacactctgtttgtaaagtctgcatgtggatattcagacatctttgaggctttcgttggaaacgggatttcttcatattctgctagacagaagaattctcagtaacttccttgtgttgtgtgtattcaactgacacagttgaactttcatttagagagagcagatttgaaacactgtttttgtggaatttgcaagtggagatttcaagcgctttcgggccaaaggcagaaaacgaaatatcttcgtataaaaactagacagaatcattctcagaaactgctctgcgatgtgtgcgttcaactctcagagtttaacttttcttttcattcagcagtttggaaacactctgtttgtaaagtctgcacgtggatattttgaccacttagaggccttcgttggaaacgggtttttttcatgtaaggctagacagaagaattcccagtaacttccttgtgttgtgtacattcaactcacagagttgaacgttcccttagacagagcagatttgaaacactctttttgtgcaattggcaagtggtgatttcagccgctttgaagtctatggtagaaaaggaaatatcttcgtataaaaactagacagaatcattcccacaaactgcgttgtgatgtgttcgttcaactcacagagtttaacctttctgttacatagagcagttaggaaacactctgtttgtaatgtctgtaagtggatattctgacatcttgtggccttcgttggaaacgggatttcttcatattctgctagacagaataattctcagtaactttccttgtgttgtgtgtattcaactcacagagttgaaggatcctttacagagagcaggcttgaaacactctttttgtcgaatttgcaagtggagatttcagccgctttgaggtcaatggtagaataggaaatatcttcttatagaaactagacagaatgattctcagaaactcctttgtgatgtgtgtgttcaactcacagagtttaacctttcttttcatagagcagctagtaaacactctgtttataaagtctgcaagtggatattcagacccctttgaggccttcgttggaaacgggatttcttcatattatgctagacagaagaattcccagtaacttccttgtgttgtgtgtgttcaactcacagagttgaactttcatttacacagagcagatttgaaacactctttttgtggaatttgcaaatggagatttcaagcgctttgaggccaaaggcagaaaaggaaatatctttgtataaaaactagacagaatcattctcagaaactgctctgcgatgtgtgcgttcaactctcagagtttaacttttcttttcattcagcagtttggaaacactctgtttgtaaagtctgcacgtggatatttcgaccacttagaggccttcgttggaaacgggtttttttcctgtaaggctagacagaagaattcccagtaacttccttgtgttgtgtacattcaactcacagagttgaacgttcccttagacagagcagatttgaaacactctttttgtgcaattggcaaatggagatttcaagcgctttaaggtcaatggcaggaaaggaaatatcttcgtttcaaaactagacagaatgattctcagaaaatcctttgtgatgtgtgcgttcaactcacagagtttaacttttcttttcatagagcagttaggaaacactctgtttgtaaagtctgcaagtggatattcagacctctttgaggccttcattggaaacgggatttcttcatattatgctagacagaataattctcagtaacttccttgtgttgtgtgtattcaactcacagagttgaacgatcctttacagagagcagacttgaaacactctttttgtggaatttgcaagtggagatttcagccgctttgaggtcaatggtagaataggaaatatcttcctatagaaactagacagaatgattctcagaaactcctttgtgatgcgtgcgttcaactcacagagtttaacctttcttttcatagagcagttgggaaacactctgtttgtaaagtctgcaagtggatattcagacttctttgaggctttcgttggaaacgggatttcttcatattctgctagaaagaagaattcccagtaacttccttgtgttgtgtgtgttcaactcacagagttgaactttcatttacacagagcagatttgaaacactctttttgtggaatttgcaagtggagatttcaagcgctttgaggctaaaggcagaaaaggaaatatcttcgtataaaaactagacagaatcattctcagaaactgctgcgtgatgtgtgcgatcaacactcagagtttaacttttcttttcattcagcggtttggaaacactctgtttgtaaagtctgcacgtggaaattttgacaacttagagaccttcgttggaaacgggattttttcatgtaaggctagacagaagaattcccagtaacttccttgtgttgtgtacattcaactcacagagttgaacgttcccttagacagagcagatttgaaacactctttttgtgcaattggcaaatggagatttcaagcgctttaaggtcaatgcagaaaaggaaatatcttcgtttcaaaactaggcagaatcattcccacaaactgcgttgtgatgtgttcgttcaactcacagagtttaacctttatgttcatagagcagttaggaaacactctgtttgtaaagtctgtaagtggatattccgacatcttgtggccttcgttggaaacgggatttcttcatattctgctagacggaagaattctcataaacttccttgtgttgtgtgttttcaactcacagagttgaacgatcctttacacagagcagacttgaaacactccttttgtggaatttgcaagtggagatttcagccgctttgaggtcaatggtagaataggaaatatcttcctatagaaactagacagaatgattctcagaaacttctttgtgatgtgtgcgttcaactcacagagtttaacctttcctttcatagagcagttaggaaacactctgtaaactctgcaagtggatattcagacctctttgaggccttcgttggaaacgggatttcttcatactatgctagacagaagaattctcagtaacttccttgtgttgtgtgtattcaactgacagagttgaacattcatttagagagagcagatttgaaacactgtttttgtggaatttgcaagtggagatttcaagcgctttggggccaaaggcagaaaaggtaatatcttcgtataaaaactagacagaatctttctcagaaactgctctgcgatgtatgcgttcaactctcagagtttaacttttcttttcattcagcagtttggaaacactctgtttgtaaagtctgcacgtggatattttgaccacttagaggccttcgttggaaacgggtttttttcctgtaaggctagacagaagaattcccagtaacttccttgtgttgtgtacattcaactcacagagttgaacgttcccttagacagagcagatttgaaacactctttttgtgcaattggcaaatggagatttcaagcgctttaagttcaatggcagaaaaggaaatatcttcgtttcaaaactagacagaatgattctcagaaactcctttgtgatgtgtgcgttcaactcacagagtttaacttttcttttcattcagcagtttggaaacactctgtttgtaaagtctgcacgtggataatttgaccacttagaggccttcattggaaacgggtttttttcatgtaaggctagacagagcaattcccagtaacttccttgtgttgtgtacattcaactcacagagttgaacgttcccttagacagaacagatatgaaacactctttttctgcaattggcaagtggtgatttcagccgctttgaggtcaatggtagaaaaggaaatatcttcgtataaaaactagacagaatgattctcagaaacttcattgtgacgtgtgcgttcaactcacagagtttaacctttcttttcatagagcagttaggaaacactctgtttgtaaagtctgcaagtggatattcagacctctttgaggccttcgttggaaacgggatttcttcatactgtgctagacagaagaattctcagtaacttccttgtgttgtgtgtattcaactcacagagttgaacgatcctttacacagagcggacttgaaacacactttttgtggaacttgcaagtggagatttcagccgcgttgaggtcaatggtagaaaaggaaatatcttcgtataaaaactagacagaatgattctcagaaactcctttgtgatgtgtgtgttcaactcacagagtttaacctttcttttcatagagcagttaggaaacactctgtttgtaaagtctgcaagaggatattcagacctctttgaggccttctttggaaacgggtttttttcatataaggctagacggaagaattcccagtaacttccttgtgttgtgtgtgttcaactcacagagttgaactttcatttacacagagcacatttgaaacactctttttgtggaatttgcaaatggagatttcaagcgctttgaggccaaaggcagaaaaggaaatatcttcgtataaaaactagacagaatcattctcagaaactgctctgcgatgtgtgcgttcaactctcagagtttaacttttcttttcattcagcagttcggaaacactctgtttgtaaagtctgcacgtggataacttgaccacttagaggccttcgttggaaacaggtttttttcacgtaaggttagacggaagaattctcagtaacttccttgtgttgtgtgtattcaactcacagagttgaacgatcctttacacagagcagacttgaaacactctatttgtagaatttgcaagtggagatttcagccgctttgacgtcaatagtagaaaaggaaatatcttcgtagaaaaactagacagaatgattctcagaaactcctttgtgatgtgtgcgttcaactcacagagtttaacctttctgttcatagagcagttaggaaacactctgtttgtaaagtctgcaagtggatattcagatctccttgaggccttcgttggaaacgggatttcttcatattctgctagacagaagaattcccagtaacttccttgtgttgtgtgtgttcaactcacagagttgaactttcatttacacagagcagatttgaaacactctttttgtggaatttgcaaatggagatttcaagcgctttgaggccaaaggcagaaaaggaaatatcttcgtataaaaactagacagaatcattctcagaaactgctctgcgatgtgtgcgttcaactctcagagtttaacttttcttttcattcagcagtttggaaacactctgtaaagtctgcacgtggataacttgaccacttagaggccttcgttggaaacgggtttttttcctgtaaggctagacaaaagaattcccagtaacttccttgtgttgtgtacattcaactcacagagttgaacgttcccttagacagagcagatttgaaacactctttttgtgcaattggcaagtggagatttcaagcgctttgaggtcaatggcagaaaaggaaatatcttcgtttcaaaactagacagaatcattcccacaaactgcgttgtgatgtgttcgttctactcacagagtgtaacctttcttttcatagagcagttaggaaacagtctgtttgaaaattctgtaaggggatattctgacatcttgtggccttcgttggaaacgggatttcttcatattctgctagacagaagaattctcagtaacttccctgtgttgtgtgtattcaactcacagagttgaatgatcctttacacagagcagacttgaaacactctttttgtggaatttgcaagtggagatttcagccgctttgagttcaatggtagaataggaaatatcttcctatagaaactagacagaatgattctcagaaactcctttgtgatgtgtgcgttcaactcacagagtttaacctttcttttcatagagcagttaggaaacactctgtttgtaaagtctgcaagtggatattcagacctctttgaggccttcgttggaaacgggtttttttcatataagctagacagaagaattcccagtaacttccttgtgttgtgtgtgttcaactcacagagttgaactttcatttacacagagcagatttgaaacactctttttgtggaatttgcaagtggagatttcaagcgctttgaggccaaaggcagaaaagttaatatcttcgtttgaaaactagacagaatcattctcagaaactgctgcgtgatgtgtgcgttcaactctaagagtttaactattcttttcattcagcggtttggaaacactctgtttgtaaagtctgcacgtggatattttgaccacttagaggccttcgttggaaacgggttttttgcatgtaaggctagacagaagaattcccagtaacttccttgtgttgtccacattcaactcacagagttgaacgttcccttagacagagcagatttgaaacactctttttgtgcaattggtaagtggtgatttcaggcgctttgaggtcaatggtagaaaaggaaatatcttcgtataaaaactagacagaaatgattctcagaaactcctttgagatgtgtgtgttcaactcacaggagtttaacctttcttttcatagagcagttaggaaacactctgtttgtaaactctgcaagtggatattcagacctctttgaggccttcgttggaaaccggatttcttcatactgtgctagacagaagaattctcattaacttccttgtgttgtgtttattcaactcacagagttgaatgatcctttacacagagcagacttgaaacactctttttgtggaatttgcaagtggagatttcagccgctttgaggtcaatggtagaaaagtaaatatcttcgtataaagactagacagaatgattctcagaaactcctttgtgatgtgtgcgttcaactcacacagtttaacctttcttttcatagagctgttaggaaacactctgtttgtaaagtctgcaagtggatattcagacctccttgaggccttcgttggaaacgggatttcttcatattctgctagaaagaagaattctcagtaacttccttgtgttgtgtgtactcaactcacagagttgaacgatcctttacacaaagcagacttgaaacactcttttagtggaatttgcaagtggagatttcagccgctttgaggtcaatagtagaaaaggaaatatcttcgtagaaaaactagacagaatcatgctcagaaactgctctgcgatgtgtgcgttcaactctcagagtttaacttttcctttcattcagcagtttggaaacactctgtttgtaaagtctgcacgtgcataatttgaccgcttagaggccttcgttggaaacgggtttttttcatgtaaggctagacagaagaattcccagtaacttccttttgttgtgtgcattcaactcacagagttgaacgttcccttagacagagcagatttgaaacactctatttgtgcaatttgcaagtgtagatttcaagcgctttaaggtcaatggcagaaaaggaaatatcttcgtttcaaaactagacagaatcattcccacaaactgcgttgtgatgtgttcgttcaactcacagagtttaacctttctgttcatagagcagttaggaaacactctgtttgtaaagtctgtaagtggatattctgacatcttgtggcgttcgttggaaacgggatttcttcatattctgctagacagaagaattctcagtaacttccttgtgttgtttgtattcaactcacagagtggaacgatcctttacacagagcagacttgaaacactctttttgtggaatttgcaagtggagatttcagccgctttgaggtcaatggtagaaaaggaaatatcttcgtaaaaaaactagacagaatgattctcagaaactcctttgtgatgtgtgcgttcatctcacagggtttaacctttcttttcatagagcagttaggaaacactcggtttgtaaagtctgcacgtggatatttggacttctttgaggccttcgttggaaacgggttttttcatgtaaggctagacagaagaattcccagtaacttcccttgtgttgtgtgtgttgaactcacagagttgaactttcatttagacagagcagatttgaaacactctttttgtggaatttgcaaatggagaattcatgcactttgaggccaaaggcagaaaaggaaatatcttcgtataaaaactagacagaatcattctcagaaactgctgcgtgatgtgcgcgttcaactctcagaatttaacttttcttttcattcagcggtttggaaacactgtgtttgtaaagtctgcacgtggatattttgaccacttagaggccttcgttggaaacgggtttttttcatgtaaggctagacagaagaattcccagtaacttccttgtgttgtgtgcattcaactcacagagttgaacgttcccttagacagagcagatttgaaacactctatttgtgcaatttgcaagtgtagatttcaagcgctttaaggtcagtggcagaaaaggaaatatcttcgtttcaaaactagacagaatcattcccacaaactgcgttgtgatgtgttcgttcaactcacagagtttaacctttctcttcatagagcagttaggaaacactctgtttgtaaagtctgtaagtggatattctgacatcttgtggccttcgttggaaaagggatttcttcatattctgctagacagaagaattctcagtaacttccttgtgttgtgtgtattcaactcacagagttgaacgatcctttacacagagcagacttgaaacacactttttgtggaatttgcaagtggagatttcagccgctttgaggtcaatggtagaataggaaatatcttcctatagaaactagacagacaatgattctcagaaactcctttgtgatgtgtgcgttcaactcacagcagtttaacctttcttttcatagagcagttaggaaacactctgtttgtaaagtctgcaagtggatattcagacctctttgaggccttcgttggaaacgggtttttttcatataaggctagacagaagaattcccagtaacttccttgtgttgtgtgtgttcaactcacagagttgaactttcatttacacagagcagatttgaaacactctttttgtggaatttgcaagtggagatttcaagcgctttgaggccaaaggcagaaaaggaaatatcttcgtttcaaaactggacagaatcattctcagaaactgctctgcgatgtgtgcgttcaactctcagagtttaacttttcttttcattcagcagtttggaaacactctgtttgtaaagtctgcacgtggataatttgaccacttagaggccttcgttggaaacgggtttttttcatgtaaggctagacagaagaattcccaggaacttccttgtgttgtgtacattcaactcacagagttgaacgttcccttagacagagcagatttgaaacactctttttgtgcaattggcaagtggtgatttcagccgctttgaggtcaatggtagaaaaggaaatatgttcgtataaaaactagacagaatgattctcagaaactcctttgtgatgtgtgcgttcaactcacagagtttaacctttcttttcatagagcagttaggaaacactctgtttgtaaactctgcaagtggatatttagacctctttgaggccttcgttggaaacgggatttcttcatactgtgctagacagaagaattctcagaaacttccttgtgttgtgtgttttcaactcacagagttgaacgatgctttacactgagtagacttgaaacacactttttgtgtaatttgcaagtggagatttcagccgctttgagttcaatggtagaaaaggaaatatcttcgtataaaaactagacagaatgattctcagaaacttctttgtgatgtgtgcgttcaactcacagagtttaacctttcttttcatagagcagttaggaaacactctgtttgtaaagtctgcaagtggatattcagacctccttgaggccttcgttggaaacgggtttttttcatataaggctagacagaagaattctcagtaacttccttgtgttgtgtgtattcaagtgacagagttgaactttcatttagagagagcagatttgaaacactgtttttgtggaatttgcacgtggagatttcaagcgctttggggccaaaggcagaaaaagatatatcttcgtataaaaactagacagaatcattctcagaaactgctgcgtaatgtgtgcgttcaactctcagagtttaacttttcttttcattcagcggtttggaaacactctgtttgtaaagtctacacgtggaaattttgaccacttagaggccttcgttggaaacgggtttttttcatgtaaggctagacagaagaattcccagtaacttccttgtgttgtgtgcattcaactcacagagttgaacgttcccttagacagagcagatttgaaacactctatttgtgcaatttgcaagtgtagttttcaagctctttaaggtcaacggcagaaaaggaaatatcttcgtttcaaaactagacagaatgattctcataaactcctttgtgatgtgtgcgttcaactcacagagtctaacctttcttttcatagagcagttaggaaacactctgtttgtaaagtctgcaagtggatattcagacctccttgaggccttcgttggaaacgggatttcttcatattctgctagacagaagaattctcagtaacttccttgtgttgtgtttattcaactcacagagttgaatgatcctttacacagagcagacttgaaacactctttttgtggaatttgcaagtggagatttcagccgctttgaggtcaatggtagaaaagtaaatatcttcgtataaagactagacagaatgattctcagaaacttctttgtgatgtgtgcgttcaactcacagagtttaacctttcttttcatagagcagttaggaaacactctgtttgtaaactctgcaagttgatattcagacctctttgaggccttcgttggaaacgggatttcttcatactatgctagacagaagaattctcagtaacttccgcgtgttgtgtgtattcaactcacagagttgaacgatcctttacacagagcagacttgaaacactctttttgtggaatttgcaagtggagatttcagccgctttgaggtcaaaggtagaaaaggaaatatcttcctataaaaactagacagaatcattcccacaaactgcgttgtgatgtgttcgttcaactcacagagtttaacctttcttttcatagagcagttaggaaacactctgttggtaaattctgtaagtggatattctgacatcttgtggcctaccgttggaaacgggatttcttcatattctgctagacagaagaattcccagtaacttccttgtgttgtgtgcattcaactcacagagttgaacgttcccttagacagagcagatttgaaacactctatttgtgcaatttgcaagtgtagatttcaagctctttatggtcaacggcagaaaaggaaatatcttcgtttcaaaactagacagaatcattcccacaaactgcgttgtgatgtgttcgttcaactcacagagtttaacctttctgttcatagagcagttaggaaacactctgtttgtaaagtctgcaagtggatattcagacctccttgaggccttcgttggaaacgggatttcatcatattatgctagacagaagaattctcagtaacttccttgtgttgtgtgtattcaactcacagagttgaacgatcctttacagagagcagacttgaaacactctttttgtggaatttgcaagtggagatttcagccgctttgaggtcaatggtagaaaaggatatatcttcgtataaagaatagacagaatgattctcagaaactcctttgtgatgtgtgcgttcaactcacagagtttcacctttcttttcatagagcagttaggaaacactctgtttgtaaagtctgcaagtggatattcagacctccttgaggccttcgttggaaacgggatttcttcatattctgctagacagaagaattcccagtaacttccttgtgttgtgtgtgttcaactcacagagttgaactttcatttacacagagcagatttgaaacactctttttgtggaatttgcaaatggagatttcaagcgctttgaggccaaagacagaaaaggaaatatcttcgtataaaaactagacagaatcattctcagaaactgctgcgtgatgtgtgcgttcaactctcagagtttaacttttcttttcattcagcggtttggaaacactctgtttgtaaattctgcacgtggaaattttgaccacttagaggccttcgttggaaacgggtttttttcatgtaaggctagacagaagaattcccagtaacttccttgtgttgtgtgcattcaactcacagagttgaacgttcccttagacagagcagatttgaaacactctatttgtgcaatttgcaagtgtagatttcaagcgctttaaggtcaacggcagaaaaggaaatatcttcgtttcaaaactagacagaatgattctcagaaactcctttgtgatgtgtgcgttcaactcacagagtttaacctttctgttcatagagcagttaggaaacactctgtttgtaaagtctgcaagtggatattcagacctcctttaggccttcgttggaaacgggatttcttcatattctgctagacagaagaattctcagtaacttccttgtgttgtgtgtattcaactcacagagttgaacaatcctttacacagagcagacttgaaacactctttttgtggaatttgcaagtggagatttcagccgctttgaggtcaatggtagaaaaggaaatatcttcgtataaagactagacagaatgattctcagaaactcctttgtgatgtgtgcgttcaactcacagagtttaaactttcttttcatagagcagttaggaaacactctgtttgtaaagtctgcaagtggatattcacacatccttgaagctttcgttggaaacgggatttcttcatattctgctagaaagaagaattcccagtaacttccttgtgttgtgtgtgttcaactcacagatttgaactttcatttacacagagcagatttgaaacactctttttgtggaatttgcaagtggagatttcaagcgctttgaggccaaaggcagaaaaggaaatatcttcgtttcaaaactagacagaatcattctcagaaactgctgcgtgatgtgtgcgttcaactctcagagtttaacttttcttttcattcagcggtttggaaacactctgtttgtaaagtctgcacgtggaaattttgaccacttagaggccttcgttggaaacgggtttttttcatgtaaggctagagagaagaattcccagtaacttccttgtgttgtgtgcattcaactcacagagttgaacgttcccttagacagagcagatttgaaacactctatttgtgcaatttgcaagtgtagatttcaagcgctttaaggtcaacggcagaaaaggaaatatcttcgtttcaaaactagacagaatgattctcagaaactcctttgtgatgtgtgtgtccaactcacagagtttaacctttcttttcatagagcagttaggaaacactctgtttgtaaagtctgcaagaggatattcagacctctttgaggccttcgttggaaacgggtttttttcctgtaaggctagacagaagaattcccagtaacttccttgtgttgtgtgtgttcaactcacagagttgaactttcatttacacagagcagatttgaaacactctttttgtggaatttgcaaatggagatttcagccgcgttgaggtcaatggtagaaaaggaaatatcttcgtttcaaaactagacagaatgattctcagaaactcctttgtgatgtgtgcgttcaactcacagagtttaacctttcttttcatagagcagttaggaaacactctgtttgtaaagtctgcacgtggatatttggacttctttgaggccttcgttggcaacggggttttttcatataaggctagacagaagaattctcagtaacttccttgtgttgtgtgtattcaactgacagagttgaactttcatttagagagagcagatttgaaacactgtttttgtggaatttgcaagtggagatttcaagcgctttggggccaaaggcagaaaaggaaatatcttcgtataaaaactcagcagaatcattctcagaaactgctctgcgatgtgtgcgttcaactctcagagtttaacttttcttttcattcagcagttaggaaacactctgtttgtaaagtctgcaagtggatattcagacctctttgaggccttcgttggaaacgggtttttttcatataaggctagacagaagaattcccagtaacttccttgcgttgtgtacattcaactcacagagttgaacgttcccttagacagagcagatttgaaacactctttttgtgcaattggcaagtggagatttcaagcgctttaaggtcaatggcagaaaaggaaatatcttcgtttcaaaactagacagaatgattctcagaaactcctttctgatgtgtgcgttcaactcgcagagtttaacttttcttttcatagagcagttaggaaacactctgtttgtaaagtctgcaagtggatattcagacctctttgaggccttcgttggaaacgggatttcttcatattctgctagacagaagaattctcagaatcttcccttgtgttgtgtgtattcaactcacagagttgaaagaccctttacacagagcggacttgaaacactctttttgtggaatttgcaagtggagatttcagccgcgttgaggtcaatggtagaaaaggaaatatcttcgtataaaaactagacagaatgattctcagaaactcctttgtgatgtgtgcgttcaactcacagagtttaacctttctattcatagagtagttaggaaacactctgtttgtaatgtctgcaagtggatattttgacctctttgaggccttcgttggaaacgggtttttttcatgtaaggctagacagaagaattcccagtaacttccttgtgttgtgtgtgttcaactcacagagttgaactttcatttacacagagcagatttgaaacactctttttgtggaatttgcaagtggagacttcaagcgctttgaggccaaaggcagaaaaggaaatatcttcgtttcaaaactagacagaatcattctcagaaactgctgcatgatatgtgcgttcaactctcagagtttaacttttcttttcattcagcggtttggaaacactctgtttgtaaagtctgcacgtggatattttgaccacttagaggccttcgttggaaacgggtttttttcatgtaaggctagacagaagaattctcagtaacttccttgtgttgtgtgtattcaactcacagagttgaacgatcctttacacagagcagacttgaaacactctatttgtgcaatttgcaagtgtagatttcaagcgctttaaggtcaatggcagaaaaggaaatatcttcgttttaaaactagacagaatcattcccacaaactgcgttgtgatgtgttcgttcaactcacagagtttaacctttctgttcatagagcagtgaggaaacactctgtttgtaaagtctgtaagtggatattctgacatcttgtggccttcgttggaaacaggatttcttcatattctgctagacagaataattctcagtaacttccttgtgttgtgtgtattcaactcacagagttgaaggatcctttagagagagcaggcttgaaacactctgtttgtcgaatttgcaagtggagatttcagccgctttgaggtcaatggtagaataggaaatatcttcttatagaaactagacagaatgattctcagaaacttctttgtgatgtgtgcgttcaactcacagagtttaacctttcttttcatagagcagttaggaaacactctgtttgtaaactctgcaagtggatattcagacctgtttgaggccttcgttggaaacgggatttcttcatactatgctagacagaagaattctcagtaacttccttgtgttgtgtgtattcaactcacagagttgaacgatcctttacacagagcagacttctaacactctttttgtggaatttgcaagtggagatttcagccgctttgaagtcaaaggtagaaaaggaaatatcttcctataaaaactagacagaatgattctcagaaactcctttgtgatgtgtgcgttcaactcacagagattaacctttcttttcatagagcagttaggaaacactctgtttgtaaagtcttcaagtggatattcagacctctttgaggccttcgttggaaacgggatttcttcatattctgctagacagaagaattctcagtaacttccttgtgttgtgtgtattcaactcacagagttgaacggatcctttacacagagcagacttgaaacactctatttgtgcaatttgcaagtgtagatttcaagcgctttaaggtcaatggcagaaaaggaaatatcttcgttttaaaactagacagaaatcattcccaaaaactgcgttgtgatgtgttcgttcatctcacagagtttaacctttcttttcatagagcagttaggaaacagtctgtttgtaaattctgtaagtggatattctgacatcttgtggccttcgttggaaacgggatttcttcatattctgctagacagaataattctcagtaacttccttgtgttgtgtgtattcaactcacagagttgaacggtcctttacacagagcagacttgaaacattctttttgtggaatttgcaagtggagatttcagccgctttgaggtcaatggtagaataggaaatatcttcctatagaaactagacagaatgattctcagaaactcctttgtgatgtgtgcgttcaactcacagagtttaacctttcttttcatagagcagttaggaaacactctgtttgtaaagtctgcaagtggatattcagacctccttgaggccttcgttggaagcgggatttcttcatgttcagctagacagaagaattctcagaaacttccttgtgttgtgtgttttcaactcacagagttgaacgatcctttacacagagcagacttgaaacactctttttgtggaatttgctagtggagatttcagccgctttgaggtcaatggtagaataggaaatatcttcctatagaaactagacagaacgattctcagaaactcctttgtgatgtgtgcgttcaactcacagtagtttaacttttcttttcatagagcagttaggaaacactctgtttgtaaagtctgcaagtggatattcagacctctttgaggccttcgttggaaacgggatttcttcctattctgctagacagaataaatctcagtaacttccttgtgttgtgtgtattcaactcacagagttgaacgatcctttacacagagcagacttgaaacactctttttgtggaatttgcaagtggagatttcagccgctttgaggtcaatagtagaaaaggaaatatcttcgtagaaaaactagacagaatcattcccacaaactgcgctgtgatgtgctcgttcaactcacagagtttaacctttctgttcatagagcagttaggaaacactctgtttgtaaagtctgtaagtggatattctgacatcttgtggccttcgttggaaacgggttttcctcatattctgccagacagaagaattctcagtaacttccttgtgttgtgtgtattcaactcacagagttgaacgatcctttacacagagcagacttgaaactctctttttgtggaatttgcaagtggagatttcagccgctttgaggtcaatggtagaataggaaatatcttcctatagaaaatagacagaatgattctcagaaactcctttgtgatgtgtgcgttcaactcacagattttaacctttcttttcatagagcagttaggaaacactctgcttgtaaagtctgcaagtggatattcagccctctttgaggccttcgttggaaacgggtttttttcatataaagctagacagaaggattcccagtaacttccttgtgttgtgtgtgttcaactcacagagttgaactttcatttacaatgagcagatttgaaacactctttttgtggaatttgcaagtggagatttcaagcgctttgaggccaaaggcagaaaaggaaatatcttcgtataaaaactagacagaatcattctcagaaactgctctgtgatgtgtgcgttcaactctcagagtttaacttttcttttcattcagcagtttggaaacactctgtttgtaaagtctgcacgtggataatttgatcacttagaggccttcgttggaaaggggtttttttcatgtaaggctagacagaagaattcccagtaacttccttgtgttgtgtgcattcaactcacagagttgaacgttcccttagacagagcagatttgaaacactctatttgtgcaatttgcaagtgtagttttcaagctctttaaggtcaacggcagaaaaggaaatatcttggtttcaaaactagacagaatgattctgagatatcctttgtgatgtgtgcgttcaactcacagagttcaacctttcttttcatagagcagttaggaaacactctgtttgtaaagtctgcaagtggatattcagacctccttgaggccttcgttggaaacgggatttcttcatattatgctagacagaggaattctcaggaacttccttgtgttgtgtgtattcaactcacagagttgaacgatcctttacacagagcagacttgaaacactctttttgtggaatttgcaagtggagatttcagccgctttgagttcaatggtagaataggaaatatcttcctatagaaactacacagaatgattctcagaaactcctttgtgatgtgtgcgttcaactcacagagtttaacctttcttttcatagagcagttaggaaacactctgtttgtaaagtctgcaagtggatattcagacctctttgaggccttcgttggaaacgggatttcttcctattctgctagacagaagaattctcagtaacttccttgtgttgtgtgtattcaactcacagagttgaacgatcctttacacagagcagacttgagacactctttttgtggaatttgcaagtggagatttcagccgctttcaggtcaatagtagaaaaggaaatatcttcgtagaaaaactagacagaatcattctcagaaactgctgcgtgatgtgtgcgttcaactctcagagtttaacttttcttttcattcagcgttttggaaacactctgtttgtaaagtctgcacgtggatattttgaccacttagaggccttcgttggaaacgggttttttttcatgtaaggctagacagaagaattcccagtaacttccttgtgttgtgtgcattcaactcacagagttgaacgttcccttagacagagcagatttgaaacactctatttgtgcaatttgcaagtgtagatttcaagcgctttaaggtcaacggcagaaaaggaaatatcttcgtttcaaaactagacagaatgattctcagaaactcctttgtgatgtgtgcgttcaactcacagagtttaacctttctgttcatagagctgttaggaaacactctgtttgtaaagtctgcaagtggatattcagacctccttgaggccttcgttggaaacgggatttcttcctattctgctagacagaataattctcagtaacttccttgtgttgtgtgtattcaactcacagtagttgaacgatcctttacacagagcagacttgaaacactctttttgtggaatttgcaagtggagatttcagccgctttgaggtcaatagtagaaaaggaaatatcttcgtagaaaaactagacagaatgattctcagaaactccttgttgatgtgtgcgttcaactcacagagtttaacttttcttctcatagagcagttaggaaacactctgtttgtaaagtctgcaagtggatattcagacctctttgaggccttcgttggaaacgggttttcttcatattatgctagacagaagaattcccagtaactttccttgtgttgtgtgtgttcaactcacagagttgaactttcatttacacagagcagatttgaaacactctttttgtggaatttgcaagtggagatttcaagcgctgtgaagccaaaggcagaaaaggaaatatcttcgtataaaaactagacagaatcattctcagaaactgctctgcgatgtgtgcgttcaactctcagagtttaacttttcttttcattcagcagtttggaaacactctgtttgtaaagtctgcacgtggataatttgaccccttagaggccttcgttggaaacgggtttttttcatgtaaggctagacagaagaattcccagtaacttccttgtgttgtgtgcattcaactcacagagttgaacgttcccttagacagagcagatttgaaacactctatttgtgcaatttgcaagtgtagatttcaagcgctttaaggtcaaaggcagaaaaggaaatatcttcgtttcaaaactagacagaaatcattcccacaaactgcgttgtgatgtgttcgttcaactcacagtagtttaacctttctgttcatagagcagttaggaaacactctgtttgtaaagtctgtaagtggatattctgacatcttgtggccttcgttggaaacgggatttcttcatattctgctagacagaagaattctcagtaacttccttgtgttgtgtgtattcaactcacagagttgaacgatcctttacacagagcagacttgaagtactctttttgtggaatttgcaagtggagatttcagccgctttgaggtcaatggtagaaaaggaaactaccttcatataaagactagacagaatgattctcagaaaatcttttgtgatgtgtgcgttcaactcacagagtttaacttttcttctcatagagcagttaggaaacactctgtttgtaaagtctgcaagtggatattcagacctctttgaggccttctttggaaacgggatttcttcatattctgctagacagaagaattcccagtaacttccttgtgttgtgtgtgttcgactcacagagttgaactttcatttacacagagcagatttgaaacactctttttgtggaatttgcaagtggagatttcaagcgctttgaggccaaaggcagaaaaggaaatatctttgtttcaaaactagacagaatcattctcagaaactgctctgcgatgtgtgcgttcaactctcagagtttaacttttcttttcattcagcagtttggaaacactctgtttgtaaagtctgcacgtggatattttgaccacttagtggccttcgttggaaacgggttttcttcctgtaagtctagacagaagaattcccagtaacttccttgtgttgtgtacattcaactcacagagttgaacgttcccttagacagagcagatttgaaacactctttttgtgcaattggcaaatggagatttcaatcgctttaaggtcaatggcagaaaaggaaatatcttcgtttcaaaactagacagacatcattcccacaaactgcgttgtgatgtgttcgttcatctcacagagtttaacctttcttttcatagagcagttaggaaacagtctgtttgtaaattctgtaagtggatattctgacatcttgtggccttcgttggaaacgggatttcttcatattctgctagacagaagaattctcagaatcttccttgtgttgtgtgtattcaactcacagagttgaatgatggtttacacagagcagatttgaaacactctttttgtggaatttgcaagtggacatttcagccgctttgaggtcaatggtagaaaaggaaatatcttcgtataaaaactagacagaatgattctcagaaactcctttgtgatgtgtgtgttcaactcacagagtttaacctttcttttcatagaacagttagtaaacactctgtttataaagtctgcaagtggatattcagacccatttgaggccttcgttggaaacgggatttcttcatattatgctagacagaagaattcccagtaacttccttgtgttgtgtgtgttcagctcacagaggtgaactttcatttacacagagcagatttgaaacactctttttgtggaatttgcaagtggagatttcaagcgctttgaggccaaaggcagaaaaggaaatatcttcgtataaaaagtagacagaatcatactcagaaactgctgcgtgatgtgtgcgttcaactctcagagtttaacttttcttttcattcaacggtttggaaacactctgtttgtaaagtctgcacgtggatattttgaccacttagaggccttcgttagaaacgggtttttttcatgtaaggctagacagaagaattcccagtaacttccttgtgttgtgtacattcaactcacagagttgaacgttcccttagacagagcagatttgaaacacactttttgtgcaattggcaagtggtgatttcagccgctttgaggtcaatggtagaaaaggaaatatcttcgtataaaaactagacagaatcattcccacaaactgcgttgtgatgtgttcgttcaactcacagagtttaacctttcttttcatagcgcagttaggaaacagtctgtttgaaaattctgtaagtggatattctgacatcttgtggccttcgttggaaacgggatttcttcatattctgctagacagaagaattctcagtaacttccttctgttgtgtgtattcaactcacagagttcaacgattctttacacagagcagacttgagacactgttttcgtggaatttgcaagtggagatttcaaccgctttgaggtcaattgtagaaaaggaaatatcttcgtataaaaactagacagaacgattctcagaaactcctttgtgatgtgtgcgttcaactcacagagtttaacttttcttttcatagagcagttaggaaacactctgtttgtaaagtctgcaagtggatattcagacccctttgaggccttcgttgaaaacgggatttcttcatattctgctagacagaagaattcccagtaacttccttgtgttgtgtgtgttcaactcacagagttgaactttcatttacacagagcagatttgaaacactctttttgtggaatttgcaagtggagatttcaagcgctttgaggccaaaggcagaaaaggaaatatattcgtataaaaactagacagaatcattctcagaaactgctctgcgatgtgtgcgttcaactctcagagtttaacttttcttttcattcagcagtttggaaacactctgtttgtaaagtctgcaagtggatattttgacctctttgaggccttcgttggaaacgggtttttttcatgtaaggctagacagaagaattcacagtaacttccttgtgttgtgtacattcaactcacagagttgaacgttcccttagacagagcagatttgaaacactctttttgtgcaattggcaagtggagatttcaagcgctttaaggtcaatggcagaaaaggaaatatcttcctttcaaaactagacagaatcattcccacaaactgcgttgagatgtgttcgttcaactcacagagtttaacctttcttttcatagagcagttaggaaacagtctgtttgtcaattctgtaagtggatattctgacatcttgtggccttcgatggaaacgggatttcttcatattctgctagagagaagaattctcagaatcttccttgtgttgtgtgtattcaactcacagagttgaacgatcctttacacagagcagacttgaaacactctttttgtggaatttgcaagtggagatttcagccgctttgaggtccatggtagaaaaggaaatatcttcgtataaaaactagacagaatgattctcagaaactcctttgtgatgtgtgtgttcaactcacagagtttaacctttcttttcatagagcagttaggaaacactctgtttgtaaagtctgcaagtggatattcagacctcgttgagaccttcgttggaaacgggatttcttcatattctgctagacagaagaattctcagtaacttccttgtgttgtgtttattcaactcacagaattgaatgatcctttacacagagcagacttgaaacactctttttgtggaatttgcaagtggagatttcagccgctttgtggtcaatggtagaaaaggaaatatcttcgtataaagactagacagaatcattctcagaaactgctgcgtgatgtgtgcgttcaactctcagagtttaacttttcttttcattcagcggtttggaaacactctgtttgtaaagtctgcacgtggaaattttgaccacttagaggccttcgttggaaacgggtttttttcatgtaaggctagacagaagaattcccagtaacttccttgtgttgtgtacattcaactcacagagttgaacgttcccttagacagagcagatttgaaacactctttttgtgcaattggcaagtggagatttcaagcgctttgaggtcaatggcagaaaaggaaatatcttcgtttcaaaactagacagaatcattcccacaaactgcgttgtgatgtgttcgttcaactcacagagtttaacctttctgttcatagagcagttaggaaacactctgtttgtaaagtctgcaagtggatattcagacctccttgaggccttcgttggaaacgggatttcttcatattctgctagacagaagtattctcagtaacttccttgtgttgtgtgtattcaactctcagagttgaacgatcctttacacagagcggacttgtaacactctttttgtggaatttgcaagtggagatttcagccgctttgaagtcaaagttagaaaaggaaataacttcctataaaaactagacagaatgattctcagaaactcctttgtgatgtgtgagttcaactcacagagtttaacctttcttttcatagagcagttaggaaacactctgtttctaaagtctgcaagtggatattcagacctctttgaggccttcgttggaaacgggtttttttcatataaggctagagagaagaaatcccagtaacttccttgtgttgtgtgtgttcaactcacagagatgaactctcatttacacagagcagatttgaaactctctttttgtggaatttgcaaatggagatttcaagcgctttgaggccaaaggcagaaaaggaaatatcttcgtataaaaactagacagaatcattctcagaaactgctgcgtgatgtgtgcgttcaactctcagagtttaacttttcttttcattcagcggtttggaaacactcagtttgtaaagtctgcacgtggatattttcaccacttagaggccttcgttggaaacgggttttttttcatgtaaggctagacagaagaattcccagtaacttccttgtgttgtgtacattcaactcacagagttgaacgttcccttagacagagcagatttgaaacactctttttctgcaattggcaagtggagatttcaagcgctttgaggtcaatggcagaaaaggaaatatcttcgtttcaaaactagacagaatcattcccacaaactgcgttgtgatgtgttccttcaactcacagagtttaacctttcttttcatagagcagttaggaaacagtctgtttgtcaattctgtaagtggatattctgacatcttgtggccttcgttggaaacgggatttcttcatattctgctagacagaagaattctcagtaactgccttgtgttgtgtgtattcaactcacagagttgaacgatcgtttacacagagcagacttgaaacactctttttgtggaatttgcaagtggagatttcagccgctttgaggtcaatggtagaataggaaatatcttcctatagaaactagacagaatgattctcagaaactcctttgtgatgtgtgcgttcaactcacagagtttaacctttcttttcatagagcagttaggaaacactctgtttgtaaaggctgcaagtggatattcagacatctttgaggccttcgttggaaaagggatttcttcatgttctgctagaaagaagaattcccagtaacttccttgtgttgtgtgtgttcaactcacagagttgaactttcatttacacagagcagattggaaacactctttttgtggaatttgcaaggggagatttcaagcgctttgaggccaaaggcagaaaaggaaatatcttcgtataaaaactagacagaatcattctcagaaactgctgcgtgatgtgtgcgttcaactctcagagtttaacttttcttttcattcagcagtttggaaacactctgtttgtaaagtctgcacgtggatattttgaccacttagaggccttcgttggaaacgggtttttttcatgtaaggctagacagaagaattcccagtaacttccttgtgttgtgtgcattcaactcacagagttgaacgttcccttagacagagcagatttgaaacactctatttgtgcaatttgcaagtgtagatttcaagctctttaaggtcaatggcagaaaaggaaatatcttcgtttcaaaactagacagaatgattctcagaaactcctttgtgatgtgtgcgttcaactcacagagtttaacctttcttttcatagagcagttaggaaacactctgtttgtaaagtctacaagtggatattcagacatctttgaggctttcgttggaaacgggatttcttcatattctgctggacagaagaattctcagaaacttcgttgtgttgtgtgttttcaaatcacagagttcaacgatcctttacacagagtagacttgaaacactctttttgtggaattggcagggtggagatttcagccgctttcaggtcaatggtagaaaaggaaatatcttcgtataaaaactagacagaatgattgtcagaaactcctttgtgatgtgtgcgttcaactcacagagtttaacctttcttttcatagagcagttaggaaacactctgtttgtaaagtctgcaagtggatattcagacctctttgaggccttcgttggaaacgggatttcttcatattctgctagacagaagaattcccagtaacttccatgtgttgtgtgtgttcaactcacagagttgaactttcatttacacagagcagatttgaaacactctttttgtggaatttgcaaatggagatttcaagcactttgaggccaaaggcagaaaaggaaatatcttcgtagaaaaactagacagaatcattctcagaaactgctctgcgatgtgtgcgttcaactctcagagtttaacttttcttttcattcagcagtttggaaacactctgtttgtaaagtctgcacgtggataacttgaccacttagaggtcttcgttggaaacgggtttttttcatgtaaggctagacagaagaattcccagtaacttccttgtgttgtgtacattcaactcacagagttgaacgttcccttagacagagcagatttgaaacactctttttgtgcaattggcaagtggtgatttcagccgctttgaggtcaatggtagaaaaggaaatatcttcgtataaaaactagacagaatcattcccacaaactgcgttctgatgtgttcgttcaactcacagagtttaacctttctgttcatagagcagttaggaaacactctgtttgtaaagtctgtaagtggatattctgacatcttgtggccttcgttggaaacgggatttcttcatattctgctagacagaagaattctcagtaacttccttgtgttgtgtgtattcaacacacagagttgaacgatgctttacacagagcagacttgaaacactctttttgtggaatttgcaagtggagatttcagccgctttgaggtcaatggtagaaaaggaaatatcttcgtataaagactagacagaatgattctcagaaactcctttgtgatgtgtgcgttcaactcacagagtttaacgtttcttttcatagagcagttaggaaacactctgtttgtaatgtctgcaagtggatattcagacccctttgaggccttcgttggaaacgggatttcttcatattatgctagacagaaagaattcccagtaacttccttgtgttgtgtgtgttcaactcacagagttgaactttgatttacacagagcagatttgaaacactctttttgtggaatttgcaagtggagatttcaagcgctttgaggccaaaggcagaaaaggaaatatcttcgtataaaaactagacagatcattctcagaaactgctctgcgatgtgtgcgttcaagtctcagagtttaacttttcttttcattcagcagtttggaaacactctgtttgtaaagtctgcacctggataatttgaccacttagaggccttcgttggaaacgggtttttttcctgtaaggctagacagaagaattcccagtaacttccttgcgttgtgtacattcaactcacagagttgaacgttcccttagacagagcagatttgaaacactctttttgtgcaattggcaagtggagatttcaagcgctttaaggtcaatggcagaaaaggaaatatcttcgtttcaaaactagacagaatgattctcagaaactcctttgtgatgtgtgcgttcaactcacagagtttaacctttcttttcatagagcagttaggaaacactctgattgtaaagtctgcaagtggatattcagaactccttgaggccttcgttggaaacgggatttcttcatattatgctagacagaataattctcagtaacttccttgtgttgtgtgtattcaactcacagagttgaacgatcctttacacagagcagacttgaaacactctatttgtagaatttgcaagtggagatttcagccgctttgaggtcaatagtagaataggaaatatcttcgtagaaaaactagacagaatgattctcagaaactcctttgtgatgtgtgcgttcaactcacagagtttaacatttcttttcatagagcagttaggaaacactctgtttgtaaagtctgcaagtggatattcagacctccttgaggccttcgttggaaacgggatttcttcatattatgctacacagaagaattctcagtaacttccttgtgttgtgtgtattcaactgacagagttgaactttcatttagagagagcagatttgaaacactgtttttgtggaatttgcaattggagatttcaagcgctttggggccaaaggcagaaaaggaaatatcttcgtataaaaactagacagaatgattctcagaaagtcctttgtgatgtgtgcgttcaactcacagagtttaacctttctgttcatagagctgttaggaaacactctgtttgtaaagtctgcacgtggaaattttgaccacttagaggccttcgttggaaacgggtttttttcatgtaaggctagacagaagaattcccagtaacttccttgtgttgtgtacattcaactcacaggagttgaacgttcccttagacagagcagatttgaaacactctttttgtgcaattggcaaatggagatttcaagcgctttaagttcaaaggcagaaaaggaaatatcttcgtttcaaaactagacagaatcattcccacaaactgcgttgtgatgtgttcgttcaactcacagagtttaacctttcttttcatagagcagttaggaaacagtctgtttgtcaattctgtaagtggatattctgacatcttgtggcattcgttggaaacgggatttcttcatattctgctagacagaagaattctcagaatcttccttgtgttgtgtgtattcaactcacagagttgaacgatcctttacacagagcagacttgaaacactctttttgtggaatttgcaagtggagatttcagccgctttgaggtccatggtagaaaaggaaatatcttcgtataaaaactagacggaatgattctcagaaactcctttgtgatgtgtgcgttcaactcacagagttaaacctttcttttcatagagcagttaggaaacactctgtttgtaaagtctgcaagtggatattcagacctccttgaggccttcgttggaaacgggatttcttcatattctgctagacagaagaattctcagtaacttccttttgttgtgtgtattcaactgacagagttgaactttcatttagacagagcagatttgaaacactctttttctggaatttgcaagtggagatttcaagcgctttgaggccaaaggcagaaaaggatatatcttcgtataaaaactagacggaatcattctcagaaactgctctgcgatgtatgcgttcaactctcagagtttaacttttcttttcattcagcagtttggaaacactctgtttgtaaattctgcacgtggatattttgaccacttagaggccttcgttggaaacgggtttttttcatgtaaggctagacagaagaattcccagtaacttccttgtgttgtgtgcattcaactcacagagttgaacgttcccttagaccgagcaggtttgaaacactctatttgtgcaatttgcaagtgtagttttcaagctctttaaggtcaacggcagaaaaggaaatatcttcgtttcaaaactagacagaatcattcccacaaactgcgttgtgatgtgttcgttcaactcacagagtttaacctttctgttcatagagcagttaggaaacactctgtgtgtaaagtctgcaagtggatattcagacctctttgaggccttcgttggaaacgggatttcttcatattctgctagacagaagaattctcagtaacttccttgtgttgtgtgtattcaactcatagagttgaacgatcctttacacagagcagacttgaaacactctatttgtagaatttgcaagtggagatttcagccgctttgaggtcaatagtagaaaaggaaatatcttcgtagaaaaactagacagaacgattctcagaaactcctttgtgatgtgtgcgttcaactcacagagtttaaactttcttttcatagagcagttaggaaacactctgtttgtaaagtctgcaagcggatattcagacctctttgaagccttcgttggaaacgggatttcttcatattatgctagacagaagaattcccagtaacttccttgtgttgtgtgtgttcaactcacagagttgaactttcatttacacagagcagatttgaaacactctttttgtggaatttgcaattggagatttcaagcgcttggaggccaaaggcagaaaaggaaatatcttcgtataaaaactagacagaatcattctcagaaactgctgcgtgatgtgtgcgttcaactctcagagtttaacttttcttttcattcagcggtttggaaacactctgtttgtaaagtctgcacgtgtatattttgaccacttagaggccttcgttggaaacgggttttttcatgtaaggctagacagaagaattcccagtaacttccttgtgttgtgtgcattcaactcacagagttgaacgttcccttagacagagcagatttgaaacactctatttgtgcaatttgcaagtgtagatttcaagcactttaaggtcaatggcagaaaaggaaatatcttcgtttcaaaactagacagaatgattctcagaaactcctttgtgatgtgtgcgttcaactcacagagtttaacctttcttttcatagagcagttaggaaacactctgttggtaaagtctgcaagtggatattcagacctctttgaggccttctttggaaacggaatttcttcatattctgctagacagaagaattctcagaaacttcctggtgttgcgtgttttcaactcacagagttcaacgatcctttacacagagtagacttgaaaaactctttttgttgaattggccagtggagatttcagccgctttgaggtcaatggtagaaaaggaaatatcttcgtataaaaactagacagaatcattctcagaaactcctttgtgatgtgtgtgcccaactcacagagtttaacctttcttttcatagagctgttaggaaacactctgtttgtaaagtctgcaagaggatattcagacctctttgaggccttcgttggaaacgggtttttttcatataaggctagacagaagaattctcagtaacttccttgtgttgtgtgtattcaactgacggagttgaactttcatttagagagagcagatttgtaacactgtttttgtggaatttgcaagtggagatttcatgcgctttggggccaaaggcagaaaaggaaatatcttcgtataaaaactagacagaatcattctcagaaactgctctgcgatgtgtgcgttcaactctcagagtttaacttttcttttaattcagcagtttggaaacactctgtttgtaaagtctgcacgtggatattttgaccacttagaggccttcgttggaaacgggtttttttcctgtaaggctagacagaagaattcccagtaacttccttgtgttgtgtgcattcaactcaaagagttgaacgttcccttagacagagcagatttgaaaaactctatttgtgcaatttgcaagtgtagatttcaagcgctttaaggtcaatggcagaaaaggaaatatcttcgtttcaaaactagacagaatcattcccacaaactgcgttgtgatgtgttcgttcaactcacagagtttaacctttctgttcatagagcagttaggaaacactctgtttgtaaagtctgtaagtggatattctgacatcttgtggccttcgttggaaaagggatttcatcatattctgctagacagaagaattctcagtaacttccatgtattgtgtgtattcaactcacagagttgaacgatcctttacacagagcagacttgaaacactctttttgtgaaatttgcaagtggagatttcagccgctttgtggtcaatggtagaataggaaatatcttcctatagaaactagacagaatgattctcagaaactcctttgtgatgtgtgcgttcaactcacagagtttaacctttcttttcatagagccgttaggaaacactctgtttgtaaagtctgcaagtggatattcagacctccttgaggccttcgttggaaacgggatttcttcatattatgctagacagaagaattcccagtaacttccttgtgttgtgtgtgttcaactcacagagttgaactttcatttagacagagcagatttgaaacactctttttgtggaatttgcaagtggagatttcaagcgctttgaggccaaaggcagaaaaggaaatatcttcgtataaaaactagacagaatcattctcagaaactgctctgcgatgtgtgcgttcaactctcagagtttaacttttcttttcattcagcagtttggaaacactctgtttgtaaagtctgcacgtggatattttgaccacttagaggccttagttggaaacggttttttttcctgtaaggctagacagaagaattcccagtaacttccttgtgttgtgtacattcaactcacagagttgaacgttcccttagacagagcagatttgaaacactctttttgtgcaattggcaaatggagatttcaagcgctttaaggtcaatggcaggaaaggaaatatcttcgtttcaaaactagacagaatcattcccacaaactgcgttgtgatgtgttcgttcaactcacagagtttaacctttcttttcatagagcagttaggaaacagtctgtttgtcaattctgtaagtggatattttgacatcttgtggccttcgttggaaacgggatttcttcatattctgctagacagaagaattctcagtaacttccttgtgttgtgtgtattcaactcacagagttgaaggatcctttacagagagcaggcttgaaacactctttttgtcgaatttgcaagtggagatttcagccgctttgaggtgaatggtagaataggaaatatcttcttatagaaactagacagaatgattctcagaaacttctttgtgatgtgtgccttcaactcacagagtttaacctttcttttcatagagcagttaggaaacactctgtttgtaaactctgcaagtggatattcagacctctttgaggccttcgttggaaacgggatttctccatactatgctagacagaagaattcccagtaacttccttgtgttgtgtgtgttcaactcacagagttgaactttcatttacacagagcagatttgaaacactctttttgtggaatttacaagtggagatttcaagcgctttgaggccaaaggcagaaaaggaaatatcttcgtataaaaactagacagaatcattctcagaaagtgctctgcgatgtgtgcgttcaactctcagagtttaactttgcttttcattcagcagtttggaaacactctgtttgtaaagtctgcacgtggataatttgaccacttagaggccttcgttggaaacgggtttttttcatgtaaggctagacagaagaattcccagtaacttccttgtgttgtgtgctttcaactcacagagttgaacgttcccttagacagagcagatttgaaacactctatttgtgcaatttgcaagtgtagatttcaagcgctttaaggtcaatggcagaaaaggaaatatcttcgtttcaaaactagacagaatcattcccacaaactgcgttgtgatgtgttccttcatctcacagagtttaacctttcttttcgtagagcagttaggaaacagtctgtttgtaaattctgtaagtggatattctgacatcttgtggccttcgttggaaacgggatttcttcatattctgctagacagaataattctcagtaacttccttgtgttgtgtgtattcaactgtcagagttgaacgatcctttacagagagcagacttgaaacactctttttgtggaatttgcaagtggagatttcagccgctttgaggtcaatggtagaataggaaatatcttcctatacaaactagacagaatgattctgagaaactcctttgtgatgtgggcgttcaactcacagagtttaacctttcttttcatagagcagttaggaaacacactgtttgtaaagtctgcaagtggatattcagacctccttgaggtcttcgttggaaacgggatttcttcatattatgctagacagaagaattctcagtaacttccttgtgttgtgtgtattcaactcagagagttgaacgatcctttacacagagcagagttgaaacactgtttttgtggaatttgcaagtggagatttcagccgctttgaggtcaatggtagaataggaaatttcttcctatagaaactagagagaatcattctcagaaactgctctgcgatgtgtgcgttcaactctcagagtttaacttttcttttcattcagcagtttggaaacactctgtttgtaaagtctgcaggtggatattttgaccactcagaggccttcgttggaaacgggtttttttcctgtaaggctagacagaagaattcccagtaacttccttgtgttgtgtacattcaactcacagagttgaacgttcccttagacagagcagatttgaaacactctttttgtgcaattggcaaatggagatttcaagcgctttaaggtcaatggcagaaaaggaaatatcttcgtttcaaaactagacagaatcattcccacaaactgcgttgtgatgtgttcgttcaactcacagagtttaacctttcttttcatagagcagttaggaaacagtctgtttgtcaattctgtaagtggatattctgacatcttgtggccttcgttggaaacggcatttcttcatattctgctagacagaagaattctcagtaacttccttgtgttgtgtgtattcaactcacaaagttgaacgatcctttacacagagcagacttgaaacactctttttgtggaatttgcaagtggagatttcagccgctttgagttcaatggtagaataggaaatatcttcctatagaaactagacagaatgattctcggaatctcctttgtaatgtgtgcgttcaactcacagagtttaacctttcttttcatagagcagttaggaaacactctgtttgtaaagtctgcaagtggatattcagacctcttttaggccttcgttggaaacgggatttcttcatattctgctagacagaagagttctcagtaacttctttgcgttgtgtgtattcaactgacagagttgaactttcatttagagagagcagatttgaaccactgtttttgtggaatttgcaagtggagatttcaagcgctttggggccaaaggcagaaaaggaaataaattcgtataaaaactagacataatcattctcagaaactgctctgcgatgtgtgcgttcaactctcagagtttaacttttcttttcattcagcagtttggaaacactctgtttgtaaagtctgcacgtggatattttgaccacttagaggccttcgttggaaatgggtttttttcctgtaaggctagacagaagaattcccagtaacttccttgtgttgtgtacattcaactcacagagttgaacattcccttagacagagcagatttgaaacactctttttgtgcaattggcaagtggagatttcaagagttttaaggtcaatggcagaaaaggaaatatcttggtttcaaaactagacagaatgattctcagaaactcctttgtgatgtgtgcgttcaactcacagagtttaacctttgtgttcatagagcagttaggaaacactctgtttgtaaagtctgcaagtggatattcagacctccttgaggccttctttggaaacgggatttcttcatattctgctagacagaagaattctcagtaacttccttgtgttgtgtgtattcaactcacagagttgaacgatcctttacagagagcagactttaaacactctttttgtggaatttgcaagtggagatttcagccgctttgaggtcaatggtacaaaaggaaatatcttcgtataaagactagacagaatgattctcagaaactcctttgtgatgtgtgcgttcaactcacagagtttaacttttcttttcatagagcagttaggaaacactctgtttgtaaagtctgcaggtggatattcagacctctttgaggccttcgttggaaacgggatttcttcatattatgctagacagaggaattctcagtaacttccttgtgttgtgtgtattcaactgacagagttgaactttcatttagagagagcagatttgaaacactgtttttgtggaatttgcaagtggagatttcaagcgctttggggacaaaggcagaaaaggaaatatctccgtataaaaactagacagaatgattctcagaaactcctttgtgatgtgtgtgttgaactcacagagtttaacctttcttttcatagagcagttaggaaacactctgtttgtaaagtctgcaagtggatattcagacctctttgaggccttcgttggaaacgggtttttttcatataagcctagacagaagaattcccagtaacttccttgtgttgtgtgtgttcaactcacagagttgaactttcatttacacagagcagatttgaaacactctttttgtgcaattggcaagtggagatttcaagcactttaaggtcaatggcagaaaaggaaatatcttcgtttcaaaactagacagaatcattcccacaaactgcgttgtgatgtgtccgttcatctcacagagtttaacctttcttttcatagagcagttaggaaacagtctgtttgtaaattctgtaagtggatattctgacatcttgtggccttcgttggaaacgggatttcttcatattctgctagacagaataattctcagtaacttccttgtgttgtgtgtattcaactcacagagttgaacgatcctttacagagagcagacttgaaacactctttttgtggaatttgcaagtggagatttcagccgctttgaggtcaacggtagaataggaaatatcttcctatagaaactagacagaatgattctcagaaaatcctttgtgatgtgtgcgttcaactcacagagtttaacttttcttttcatagagcagttaggaaacactctgtttgtaaagtctgcaagtggatattcagacctctttgaggccttcgttggaaacgggatttcttcatattatgcgagacagaagaattccctgtaacttccttgtgttgtgtgtgttcaactcacagagttgaactttcatttacacagagcagatttgaaacactctttttgtggaatttgcaaatggagatttcagccgcgttgaggtcaatggtagaaaaggaaatatcttcgtttcaaaactagacagaatcattctcagaaactgctctgcgatgtgtgcgttcaactctcagagtttaacttttcttttcattcagcagtgtggaaacactctgtttgtaaagtctgcacgtggatattttgaccacttagaggccttcgttggaaacgggtttttttcctgtaaggctagacagaagaattcccagtaacttccttgtgttgtgtacattcaactcacagagttgaaggttcccttagacagagcagacttgtaacactctttttgtggaatttgcaagtggagatttcagccgctttgaagtcaaaggtagaaaaggaaatatcttcctataaaaactagacagaatgattctcagaaactcctttgtgatgtgtgcgttcaactcacagagtttaacttttcttttcatagagcagttgggaaacactctgtttgtaaagtctgcaagtggatattcagacatccttgaggctttcgttggaaacgggatttcttcatatactgctagaaagaagaattctcagtaacttccttgtgttgtgtgttttcaactcacagagttgaacgatcctttacacagagcagacttgaaacactccttttgtggaatttgcaagtggagatttcagccgctttgaggtcaatggtagaataggaaatatcttcctatagaaactagacagaatgattgtcagaaactcctttgtgatgtgtgcgttcaactcacagaatttaacctttcttttcatagagaagttaggagacactgggttggtaaagtctaaaagtggatattcagacatctttgagggtttcgttggaaaagggatttattcatattctgctagacagaagaattcccagtaacttccttgtgttgtgtgtgttcatctcacagagttgaactttcatttacacagagcagatttgaaacactctttttgtggaatttgcaaatggagatttcaagcgctttgaggccaaaggcagaaaaggaaatatcttcgtataaaaactagacagaatcattctcagaaactgctctgcgatgtgtgcgttcaactctcagagtttaacttttcttttcattcagcagtttggaaacactctggttgtaaagtctgcacgtggataacttgaccacttagaggccttcgttggaaacgggtttttttcctgtaaggctagacagaagaattctcagtaacttccttgtgttgtgtgtattcaactcacagagttgaacgatcctttacacagagcagacttgaaacactctttttgtggaatttgcaagtggagatttcagccgctttgaggtcaatggtagaaaaggaaactatcgtcgtataaagactagacagaatgattctcagaaaatgctttgtgatgtgtgcgttcaactcacagagtttaacttttcttttcatagagcagttaggaaacactctgtttgtaaagtctgcaagtggatattcagacctctttgaggccttctttggaaacgggatttctacatattctgctagacagaagaattctcagtaacttccttgtgttctgtgtattcaactcacagagttgaatgatcctttacagagagcagacttgaaacactctttttgtggaatttgcaagtggagatttcagccgctttgaggtcaatggtagaataggaaatatcttcgaagaaaaactagacagaatgattctcagaaactcctttgtgatgtgtgtgttcaactcacagagtttaacctttgttttcatagagcagttagtaaacactctgtttataaagtctgcaagtggatattcagacccctttgaggccttcgttggaaacgggatttcttcatattatgctagacagaagaattctcagtaacttccttttgttgtgtgtattcaactgacagagttgaactttcatttagagagagcagatttgaaacactgtttttgtggaatttgcaagtggagatttcaagcgctttggggccaaaggcagaaaaggaaatatcttcgtataaaaactagacagaatcattctcagaaactgctctgtgatgtgtgcgttcaactctcagagtttaacttttcttttcattcagcagtttggaaacactctgtttgtaaagtctgcacgtggatattttgaccacttagaggccttcgttggaaacgggtttttttttcacgtaaggctagacagaagaattcccagtaacttccttgtgttgtgtacattcaactcacagagttgaaagttcccttagacagagcagacttgtaacactctttttgtggaatttgcaagtggagatttcagccgctttgaagtcaaaggtagaaaaggaaatatcttcctataaaaactagacagaatcattcccacaaactgcgttgcgatgtgttcgttcaactcacagagtttaacatttcttttcatagagcacttaggaaacagtctgtttgtaaattctgtaagtggatattctgacatcttgtggccttcgttggaaacgggatttcttcatattctgctagacagaagaattctcggaaacttccttgtgttgtgtgtattcaactcacagagttgaacgatcctttacacagagcagactggaaacactctttttgtgaaatttgcaagtggagatttcagccgctttaaggtcaatggtaaaataggaaatatcttcctatagaaactagacagaatgattctcagaaacccctttgtgatgtgtacgttcaactcacagagtttaacctttcttttcatagagcagttaggaaacactctgtttgtaaagtctgcaagtggatattcagacctccttgaggccttcgttggaaactgcatttcttcatattatgctagacagaagaattctcagtaacttccttgtgttgtgtgtattcaactgacagagttgaactttcatttagagagagcagatttgaaatactgtttttgtggaatttgcaagtggagatttcaaacgctttggggccaaaggcagaaaaggaaatatcttcgtataaaaactagacagaatcattctcagaaactgctgcgtgatgtgtgcgttcaactctcagagtttaacttttcttttcattcagcggtttggaaacactctgtttgtaaagtctgcacgtggatattttgaccacttagaggccttcgttggaaacgggttttcttcatgtaaggctagacagaagaattcccagtaacttaccttgtgttgtgtacattcaactcacagagttgaacgttcccttagacagagcagatttgaaacactctttttgtgcaattggcaagtggagatttcaagcgctttaaggtcaatggcagaaaaggaaatatcttcgtttcaaaactagacagaatcattcccacaaactgcgttgtaatgtgttcgttcaactcacagagtttaacctttctgttcatagagcagttaggaaacactctgtttgtaaagtctgtaagtggatattctgacatcttgtggccttcgttggaaacgggatttcttcatattctgctagacagaagaattctcagtaacttccttgtgttgtgtgtattcaactcacagagttgaacgatcctttacacagagcagacttgaaacactctttttgtggaatttgcaagtggagatttcagccgctttgaggtcaatggtataataggaaatatcttcctatagaaactagacagaatgattgtcagaaactccttggtgctgtgtgcgttcaactcacagagtttaaactttcttttcatagagcagttaggaaacactctgtttgtaaagtctgcaggtggattttcagacatcattgaggctttcgttggaaacgggatttcttcatattctgctagacagaagaattcccagtaacttccttgtgttgtgtgtgttcaactcacagagttgaactttcatttacacagagcagatttgaaacactctttttgtggaatttgcaaatggagatttcaagggctttgaggccaaaggcagaaaaggaaatgtcttcgtttcaaaactagacagaatcattctcagaaactgcttctggcgatgtgtgcgttcaactctcagagtttaacttttcttttcattcagcagtttggaaacactctgtttgtaaagtctgcacgtggatattttgacgacttagaggccttcgttggaaacgggtttttttcctgtaaggctagacagaagaattcccagtaacttccttgtgttgtgtacattcaactcacagagttgaacgttcccttagacagagcagatttgaaacactctttttgtgcaattggcaaatggagatttcaagcgctttaagttcaatggcagaaaaggaaatatcttcgtttcaaaactggacagaatcattcccacaaactgcgttgtgatgtgttcgttcaactcacagagtttaacctttcttttcatagagcagttaggaaacagtctgtttgaaaattctgtaagtggatattctgacatcttgtggccttcgttggaaacgggatttcttcatattctgctagacagaagaattctcagtaacttccttgtgttgtgtgtattcaactcacagagttgaacgatcctttacacagagcagacttgaaacactctttttgcggaatttgtaagtggagatttcagccgctttgaggtcaatggtagaaaaggaattatcttcgtataaaaactagacagaatcattctcagaaactcctttgtgatgtgtgcgttcaactcacagagtttaacctttcttttcatagagcagttaggaaacactctgtttgtaaagtctgcaagtggatattcagacctccttgaggccttcgttggaaacgggatttcttcatattatgctagacagaataattctcagtaacttccttgtgttgtgtgtattcaactcacagagttgaaggatcctttacagagagcaggcttgaaacactctttttgtggaatttgcaagtggagatttcagccgctttgaggtcaatggtagaataggaaatatcttcttatacaaactagacagaatcattctcagaaactgctgtgtgatgtgtgcgttcaactctcagagtttaacttttcttttcattcagcggtttggaaacactctgtttgtaaagtctgcacgtggatattttgaccacttagaggccttcgttggaaacgggtttttttcatgtaaggctagacagaagaattcccagtaacttccttgtgttgtgtacattcaactcacagtgttgaacgttcccttagacagagcagatttgaaacactctttttgtgcaactggcaagtggagatttcaagcgctttaaggtccatggcagaaaaggaaatatcttcgtttcaaaactagacagaatcattcccacaaactgcgttgtgatgtgttcgttcaactcacagagtttaacctttcttttcatagagcagttaggaaacactctgttggtaaattctgtaagtggatattctgacatcttgtggccttcgttggaaacgggatttctacatattctgccagacagaataattctcattaacttccttgtgttgtgtgtattccactcacagagttgaacgatcctttacagagagcagacttgaaacactctttttgtggaatttgcaagtggagatttcagccgctttgaggtcaatggtagaataggaaatatcttcctatggaaactagacagaatgattctcagaaactcctttgtgatgtgtgtgttcaactcacagagtttaacctttcttttcatagagcagttagtaaaaagtctgtttataaagtctgcaggtggatattcagacccctttgaggccttcgttggaaacgggatttcttcatattatgctagacagaagaattcccagtaacttccttgtgttgtgtgtgttcaactcacagagttgaactttgatttacacagagcagatttgaaacactctttttgtggaatttgcaagtggagatttcaagcgctttgaggccaaaggcagaaaaggaaatatcttcgtttcaaaactagacagaatcattctcagaaactgctgcgtgatgtgtgcgttcaactctcagagtttaacttttcttttcattcagcggtttggaaacactctgtgtgtaaagtctgcacgtggatattttgaccacttagagaccttcgttggaaacgggattttttcatgtaaggctagacagaagaattcccagtaacttccttgtgttgtgtgcattcaactcacagagttgaacgttcccttagacagagcagatttgaaacactctatttgagcaatttgcaagtgtagatttcaagcgctttaaggtcaatggcagaaaaggtaatatcttcgtttcaaaactagacagaatcattcccacaaactgcgttgtgatgtgttcgttcaactcacagagtttaacctttctgttcatagagcagttaggaaacactctgtttgtaaagtctgtaagtggatattctgacatcatgtggccttcgttggaaacgggatttcttcatattctgctagacagaagaattctcagaaacttccttgtgttgtgtgttttcaactcacagagttgaacgatcctttacacagagcagactggaaacactccttttgtggaatttgcaagtggagatttcagccgctttgaggtcaatggtagaataggaaatatcttcctatagaaagtagacagaatgattctcagaaactcctttgtgatgtgtacgttcaactcacagagtttaacctttcttttcatagagcagttgggaaacactctgtttgtaaagtctgcaagtggatattccgacatccttgaggctttcgttggaaacgggatttcttcatattctgctagaaagaagaattctcagtaacttccttgtgttgtgtgtattcaactcacagagttgaacgatcctttacacagagcagacttgaaacactctttttgtggaatttgcaagtggagatttcagccgctttgaggtcaatggtagaataggaaatatcttcctatagaaactagacataatcattctcagaaactgctgcgtgatgtgtgccttcaactctcagagtttaacttttcttttcattcagcggtttggaaacactctgtttgtaaagtctgcacgtggatattttgaccacttagaggccttcgttggaaacgggtttttttcatgtaaggctagacagaagaattcccagtaacttccttgtgttgtgtgcattcaactcacagagttgaacgttcccttagacagagcagatttgaaacactctatttgtgcaatttgcaagtgtagatttcaagcgctttaaggtcaatggcagaaaaggaaatatcttcgtttcaaaactagacagaatgattctcagaaactcctttgtgatgtgtgcgttcaactcacagagtttaacgtttcttttcatagagcagttaggaaacactctgtttgtaaagtctgcaagtggatattcagacatctttgaggctttcgttggaaacgggatttcttcatattctgctagaaagaagaattctcagtaacttccttgtgttgtgtgtattcaactcacagagttgaatgatcctttacacagaacagtcttgaaacactctttttgtggaatttgcaagtggagatttcagccgctttgaggtcaatggtagaataggaaatatcttcctatagaaactagacagaatgattctcagaaactcctttgtgatgtgtgcgttcaactcacagagttcaacctttcttttcatagagcagttggaaaacactctgtttgtaaagtctgcaagtggatattcaaacttctttgaggccttcgttggaagcgggatttcttcatattctgctagacagaaggattcctagtaacttccttgtgttgtgtgtgttcaactcacagagttgaactttcatttacaaagagcagatttgaaacactctttttgtggaatttgcaagtggagatttcaagcgctttgaggccaaaggcagaaaaggaaatatcttcgtataaaaactagacagaatcattctcagaaactgctgcgtgatgtgtgcgttcaactctcagagtttaacttttcttttcattcagcggtttggaaacactctgtttgtaaagtctgcacgtggatgttttgaccacttagaggccttcgttagaaactggtttttttcatgtaaggctagacagaagaattcacagtaacttccttgtgttgtgtgcattcaactcacatagttgaacgttcccttagacagagcagatttgaaacactctatttgtgcaattcgcaagtgtagatttcaagcgctttaaggtcaatggcagaaaaggaaatatcttcgtttcaaaactagacagaatcattctcacaaactgcgttgtgatgtgttcgttcaactcacagagattaacctttctgttcatagagcagtgaggaaacactctgtttgtaaagtctgtaagtggatattctgacatcttgtggccttcgttggaaacgggatttcttcatattctgctagacagaagaattctcagtaacttccttgtgttgtgtgtattcaactcacagagttgaacgatcctttacacagagcagacttgaaacactctttttgcggaatttgcaagtggagatttcagccgctttgaggtcaatggtagaataggaaatatcgtcctatagaaactagacagaaatgattctcagaaactcctttgtgatgtgtgtgttcaactcacagagtttaacatttcttttcatagagcagttaggaaacactctgtttgtaaagtctgcaagtggatattcagacctctttgaggccttcgttggaaacgggtttttttcatataaggctagacagaagaattcccagtaacttccttgtgttgtgtgtgttcaactcacagagttgaactttcatttacacagagcagatttgaaacactctttttgtggaatttacaaatggagatttcaagcgctttgaggccaaaggcagaaaaggaaatatctacgtataaaaactagacagaatcattctcagaaactgctgcgtgatgtgtgcgttcaactctcagagtttaacttttctttacattcagcggtttggaaacactctgtttgtaaagtctgcacgtggatattttgaccacttagaggccttcgatggaaacgggattttttcatgtaaggctagacagaagaattcccagtaacttccttgtgttgtgtgcattcaactcacagagttgaacgttcccttagacagagcagatttgaaacactctatttgtgcaatttgcaagtgtagatttcaagcgctttaaggtcaacggcagaaaaggaaatatcttcgtttcaaaactagacagaatcattcccacaaactgcgttgtgatgtgttcgttcaactcacagagtttaacctttcttttcatagagcagttaggaaacagtctgtttgaaaattctgtaagtggatattctgacatcttgtggccttcgttggaaacgggatttcttcatattctgctagacagaagaattctcagtaacttccttgtgttgtgtgtattcaactcacagagttgaacgatcctttacagagagcagacttgaaacactctttttgtggaatttgcaagtggagatttcagccgctttgaggtcaatggcagaaaaggaaatatcttcgtataaagactagacagaatgattctcagaaactcctttgtgatgtgtgcgttcaacacacagagtttaacttttcttttcatagagcagttaggaaacactctgtttgtaaagtctgcaagtggatattcagacctctttgaggccttcgttggaaacgggatttcttcatattatgctagacagaataattctccgtaacttccttgtgttgtgtgtattcaactcacagagttgaacgatcctttacagagagcagacttgaaacactctttttgtggaatttgcaagtggagatttcagccgctttgaggtcaatggtagaatgggaaatatcttcctatagaaactagacagaatctttctcagaaactgctctgcgatgtgtgcgttcacctctcagagtttaacttttcttttcattcagcagtttggaaacactctgtttgtaaagtctgcacgtggatattttgaccacttagagtccttcgttggaaacgggtttttttcatgtaaggctagacagaagaattcccagtaacttccttgtgttgtgtgcattcaactcacagagatgaacgttcccttagacagagcagatgtgaaacactctatttgtgcaatttgcaagtgtagatttcaagcactttaaggtcaatggcataaaaggaaatatcttcgtttcaaaactagacagaatcattcccacaaactgcgttgtgatgtgttcgttcaactcacagagtttaacctttcttttcatagagcagttaggaaacagtctgtttgtcaattctgtaagtggatattctgacatcttgtggccttctttggaaacgggatttcttcatattctcctagacagaagaattctcagaatcttccttgtgttgtgtgtattcaactcacacagttgaacgatggtttacacagagcagatttgacacactctttttgtggaatttgcaattggaaatttcagccgctttgaggtcaatggtagaaaaggaaatatcttcgtataaaaactagacagaatgattctcagaaactcctttgtgatgtgtgcgttcaactcaaagagtttaacttttcttttcatagagcagttaggaaacactctgtttgtaaagtctgcaagtggatattcagacctctttgaggccttcgttggaaacgggatttcttcatattatgctagacagaagaattctcagtaacttccttgtgttgtgtgtagtcaactcacagagttgaacgatcctttacacagagcagacttgaaacattctttttgtggaatttgcaagtggagatttcagccgctttgaggtcaatagtagaaaaggaaatatcttcgtagaaaaactagacagaatcattctcagaaactgctctgcgatgtgtgcattcaactctcagagtttaatttttcttttcattcagcagtttggaaacattctctttgtaaagtctgcacgtggatattttgaccacttagaggccttcgttggaaacgggttttattcttgtaaggctagacagaagaattcccagtaacttccttgtgttgtgtacattcaactcacagagttgaacgttcccttagacagagcagatttgaaacactctttttgtgcaattggcaagtggagatttcaagcgctttgaggtcaatggcagaaaaggaaatatcttcctttcaaaactagacagaatcattcccacaaactgcgttgtgatgtgttcgttcaactcacagagtttaacctttctgttcatagagcagttaggaaacactctgtttgtaaagtctgtaagtggatattctgatatcttgtggccttcgttggaaacgggatttcttcatattctgctagacagaagaattctcagaatcttccttgtgttgtgtgtattcaactcacagaggtgaacgatcctttacacagagcagacttgaaacactctttttgtggaatttgcaagtggagatttcagccgctttgaggtccatggtagaaaaggaaatatcttcgtataaaaactagacagaatgattctcagaaacttcattgtgacgtgtgcgttcaactcacagagtttaacctttcttttcatagagcagttaggaaacactctgtttgtaaagtctgcaagtggatattcggacctctttgaggccttcgttggaaacgggatttcttcatactgtgctagacagaagaattctcagtaacttccttttgttgtgtgtattcaactgacagagttgaactttcatttagagagagcagatttgaaacactgtttttgtgcaatttgcaagtggagatttcaagcgctttggggccaaaggcagaaaaggaaatatcttcgtataaaaactagacagaatcattctcagaaactgctgcgtgatgtgtgcgttcaactctcagagtttaacttttcttttcattcagcggtttggaaacactctgtttgtaaagtctgcacgtggatattttgaccacttagaggccttcgttggaaacggttttttttcatgtaaggctagacagaagaattcccagtaacttccttgtgttgtgtgcattcaactcacagagttgaacgttcccttagacagagcagatttgaaacactctatttgtgcaatttgcaagtgtagatttgaagcgctttaaggtcaatggcagaaaaggaaatatcttcgtttcaaaactagacagaatcattcccacaaactgcattgtgatgtgttcgttcaactcacagagtttaacctttctgttcatagagcagttaggaaacactctgtttgtaaagtctgcaagtggatattcagacctccttgaggccttcgttggaaacgggatttcttcatattctgctagacagaagaattctcagtaacttccttgtgttgtgtgtattcaactcacagagttgaacgatcctttacacagagcagacttgaaacactctatttgtagaatttgcaagtggagatttcagccgctttgaggtcaatagtagaaaaggaaatatcttcgtagaaaaactagacagaatgattctcagaaactcctttgtgatgtgtgtgttcaactcacagagtttaacctttcttttcctagagcagttagtaaacactctgtttataaagtctgcaagtggatattcagacccctttgaggccttcgttggaaacgggatttcttcatattatgctagacagaagaattctcagtaacttccttgtgttgtgtgtattcaactgacagagttgtactttcatttagagagagcagatttgaaacactgtttttgtggaatttgcaagtggagatttcaagcgctttggggccaaaggcagaaaaggaaatatcttcgtataaaaactagacagaatgattctgagaaactcctttgtgatgtgtgcgttcaactcaccgagtttaacctttcttttcacagagcagttaggaaacactctgtttgtaaagtctgcaagtggatattcagacctccttgaggccttcgttggaaacgggatttcttcatattatgctagacagaagaattctcagtaacttccttgtgttgtgtgtattcaactcacagagttgaacgatcctttacacagagcagacttgaaacactctttttgtgaaatttgcaagtggagattccagccgctttgtggtcaatggtagaataggaaatatcttcctatagaaactagacagaatgattctgagaaactcctttgtgatgtgtgcgttcaactcacagagtttaacctttcttttcatagagcagttaggaaacactctgtttgtaaagtctgcaagtggatattcagacctccttgaagccttcgttggaaacgggatttcttcatattatgctagacagaagaattctcagtaacttccttgtgttttgtgtattcaactcacagagttgaacgatcctttacacagagcagacttgaaacactctttttgtggaatttgcaagtggagatttcagccgctttgagttcaatggtagaataggaaatatcttcctatagaaactagacagaattattctgagaaactcctttgtgatgtgtgcgttcaactcacagagtttaacctttcttttcatagagcagttaggaaacactctgtttgtaaagtctgcaagtggatattcagacctccttgaggccttcgttggaaacgggatttcttcatattatgctagacagaagaattcccagtaacttccttgtgttgtgtgtgatcaactcacagagttgaactttcatttacacagagcagatttgaaacactctttttgtggaatttgcaggtggagatttcaagcgctttgaggccaaaggcagtaaaggaaatatcttcgtataaaaactagacagaatcattctcagaaactgctctgcgatgtgtgcgttcaactctcagagtttaacttttcttttcattcagcagtttggaaacactctgtttgtaaagtctgcatgtggataacttgaccacttagaggacttcgttggaaacgggtttttttcctgtaaggctagacagaagaattcccagaaacttccttgtgttgtgtacattcaactcacagagttgaacgttcccttagacagagcagatttgaaacactctttttgtgcaattggcaagtggtgatttcagccgctttgaggtcaatggtagaaaagggaatatcttcgtataaaaactagacagaatcattcccacaaactgcgttgtgatgtgttcgttcaactcacagagtttaacctttctgttcatagagcagttaggaaacactctgtttgtaaagtctgtaagtagatattctgacatattgtggccttcgttggaaacgggatttcttcatattatgctagacagaagaattctcagtaacttccttgtgttgtgtgtattcaactcacagagttgaacggtcctttacagagagcagacttgaaacactctttttgtggaatttgcaagtggagatttcagccgctttgaggtcaatggtaaaataggaaatatcttcgtatagaaactagacagaatgattctcagaaactcctttgtgatgtgtgtgttcaactcacagagtttaacctttcttttcatagagcagttaggaaacactctgtttataaagtctgcaagtggatattcagacccctttgtggccttcgttggaaacgggatttcttcatattatgctagacagaagaattctcagtaacttccttgtgttgtgtgtattcaactgacagaattgaactttcatttagagagagcagatttgaaacactgtttttgtggtatttgcaagtggagatttcaagcgctttggggccaaaggcagaaaaggaaatatcttcgtataaaaactagacagaatcattctcagaaactgctgcgtgatgtgtgcgttcaactctcagagtttaacttttcttttcattcagcggtttggaaacactctgtttgtaaagtctgcacgtggaaattttgaccacttagaggccttcgttggaaacgggattttttcatgtaaggctagacagaagaattcccagtaacttccttgtgttgtgtacgttcaactcacagagttgaacgttcccttagacagagcagatttgaaacactctttttgtgcaattggcaagtggagatttcaagcgctttaagttcaatggcagaaaaggaaatatcttcgtttcaaaactagacagaacgattctaagaaactcctttgtgatgtgtgcgtacaactcacagagtttaacctttcttttcatagagcagttaggaaacactctgtttgtaaagtctgcaagtggatattcagacctctttgagtccttcgttggaaacgggatttcttcatattctgctagacagaagaattctcagtaacttccttgtgttgtgtgtattcaactcacagagttgtacgatcctttacacagagcagacttgaaacactctttttgtggaatttgcaagtggagatttcagccgctttgaggtcaatagtagaaaaggaaatatcttcgtagaaaaactagacagaatgattctcataaactcctttgtgatgtgtgagttcaaatcacagagtttaacttttcttttcatagatcagttaggaaacactctgtttctaaagtctgcaagtggatattcagatctctttgaggccttcgttggaaacgggatttcttcatattatgctagacagaagaattcccagtaacttccttgtgttgtgtgtgttcaactcacagagttgaactttcatttacacagagcagatttgaaacactctttttgtggaatttgcaaacggagatttcaagcgctttgaggccaaaggcagaaaaggaaatatcttcgtttcaaaactagacagaatcattctcagaaactgctctgcgatgtgtgcgttcaactctcagagtttaacttttcttttcattcagcagtttggaaacactctgtttgtaaagtctgcacgtggatattttgaccacttagaggccttctttggaaacgggttttttcctgtaaggctagacagaagaattcccagtaacttccttgtgttgtgtacattcaactcacagagttgaacgttcccttagacagagcagatttgaaacactctttttgtgcaattggcaagtgcaaatttcaagcgctttaaggtcaatggcagaaaaggaaatatcttcgtttcaaaactacacagaatcattcccacaaactgcgttgtgatgtgttcgttcaactcacagagtttaacctttccgttcatagagcagttaggaaacactctgtttgtaaagtctgtaagaggatattctgacatcttgtggccttcgttggaaacgggatttcttcatattctgctagacagaagaattctcagtaacttccttgtgttgtgtgtattcaactcacagagttgaacgatcctttacacagagcagacttgaaacactctttttgcggaatttgcaagtggagatttcagccgctttgaggtcaatggtagaataggaaatatcttcctgtagaaactagacagaacgattctcagaaactcctttgtgatgtgtgcgttcaactcacagagtttaacttttcttttcatagagccgttaggaaacactctgtttgtaaagtctgcaagtggatattcagacctctttgaggccttcgttagaaacgggatttcttcctattctgctagacagaagaattctcagtaactgccttgtgttgtgtgtatacaactcacagagttgaacgatcctttacacacagcagacttgaaacactctttttgtggaatttgcaagtggagatttcagccgctttgaggtcaatggtagaataggaaatatcttcctatagaaactagacagaatcattctcagaaactgctctgcgatgtgtgcgttgaactctcagagtttaacttttcttttcattcagcaatttggaaacactctgtttgtaaagtctgcacgtggatattttgaccacttagaggccttcgttggaaacgggtttttttcctgtaaggctagacagaagaattcccagtaacttccttgtgttgtgtacattcaactcacagagttgaacgttcccttagacagagcagatttgaaacactctttttgtgcaattggcaaatggagatttcaagcgctttaagttcaatggcagaaaaggaaatatcttcgtttcaaaactagacagaatcattctcagaaactgctctgcgatgtgtgcgttcaactctcagagtttaacttttcttttcattcagcagtttggaaacactctgtttgtaaagtctgcacgtggataatttgaccacttagaggctttcgttggaaacgggtttttttcatgtaaggctagacagaagagttctcagtaacttccttgtgttgtgtgtattcaactcacagagttgaacgatcctttacacagagcagacttggaacactctttttgtggaatttgcaagtggagatttcagccgcgttgaggtcaatggtagaaaaggaaatatcttcgtataaaaactagacagaatgattctcagaaactcctttgtgatgtgtgtgttcaactcacagagtttaacctttcttttcatagagcagttaggaaacactctgtttataaagtctgcaagtggatattcagacctccttgaggccttcgttggaaacgggatttcttcatattctgctagacagaagaattcccagtaactcccttgtgttgtgtgtgttcaactcacagagttgaactttcatttacacagagcagatttgaaacactctttttgtggaatttgcaagtggagatttcaagcgctttgaggccaaaggcagaaaaggaaatatcttcgtataaaaactacacagaattattctcagaaactgctgcgtgatgtgtgcgttcaactctcagagtttaacttttcttttcattcagcggtttggaaacactctgtttgtaaagtctgcacgtggatattttgaccacttagaggccttcgttggaaacgggttttttttcatgtaaggctagacagaagaattcccagtaacttccttgtgttgtgtacattcaactcacagagttgaacgttcccttagacagagcagatttgaaacactctttttgtgcaattggcaaatggagatttcaagcgctttaaggtcaatggcagaaaaggaaatatcttcgtttcaaaactagacagaatcattcccacaaactgcgttgtgatgtgttcgttcaactcacagagtttaacctttctgttcatagagcagttaggaaacactctgtttgtaaagtctgtaagtggatattctgacatcttgtggccttcgttggaaacgggatttcttcatattctgctggacagaagaattcccagtaacttccttgtgttgtgagtgttcaactcacagagttgaaatttcatttacacagagcagatttgaaacactctttttgtggaatttgcaagtggagatttcagccgctttgaggtccttggtagaaaaggaaatatcttcgtataaaaactagacagaatgattctcagaaactcctttgtgatgtgtgtgttcaactcacagagtttaacctttcttttcatagagaagttagtaaacactctgtttataaagtctgcaagtggatattcagacccctttggggccttcgttggaaacgggatttcttcatattatgctagacagaagaattctcagaatcttccttgtgttgtgtgtattcaactcacacagttgaacgattgtttacacagagcagatttgaaacactctttttgtggaatttgcaagtggagatttcaagcgctttgaggccaaaggcagaaaaggaaatatcttcgtataaaaactagacagaatcattctcagaaactgctctgcgatgtgtgcattcaactctcagagtttaacttttcttttcattcagcagtttggaaacactctgtttgtaaagtctgcacgtggatattttgaccatttagaggccttcgttggaaacgggtttttttcttgtaaggctagacagaagaattcccagtaacttccttgtgttgtgtgcattcaactcacagagttgaacgttcccttagacagagcagatttgaaacactctatttgtgcaatttgcaagtgtggatttcaagcgctttaaggtcaacggcagaaaaggaaatatcttcgtttcaaaactagacagaatcattcccacaaactgcgttgtgatgtgttcgttcaactcacagagtttaacctttctgttcatagagcagttaggaaacactctgtttgtaaagtctgtaagtggatattctgacatcttgtggccttcgttggaaacgggatttcttcctattctgctagacagaagaattctcagaaacttcccttgtgttgtgtgttttcaactcacagagttgaacgatcctttacacagagcagacttgaaacactccttttgtggaatttgcaagtggagatttcagccgctttgaggtcaatggtagaataggaaatatcttcctatagaaactagacagaatgattctcagaaacttctttgtgatgtgtgcgttcaactcacagactttaacttttcttttcatagagcagttagtaaacactctgtttgtaaagtctgcaagtggatattcagacctctttgaggccttcgttggaaacgggatttcttcatattctgctagacagaagaattctcagtaacttccttgtgttgtgtgtattcaactgacagagttgaactttcatttagagagagcagatttgaaacactgtttttgtggaatttgcaagtggagatttcaagcgctttggggccaaaggcagaaaaggaaatatcttcgtataaaagctagacagaatcattctcagaaactgctgcgtgatgtgtgcgttcaactcacagagtttaagttttcttttcattcagcggtttggaaacactctgtttgtaaagtctgcacgtggatattttgaccacttagaggccttcgttggaaacgggtttttatcatgtaaggctagacagaagaattcccagtaactttccttgtgttgtgtgcaatcaaatcacagagttgaacgttcccttagacagagtagatttgaaacactctatttgtgcaatttgcaagtgtagatttcaagcgctttaaggtcaaaggcagaaaaggaaatatcttcgtttcaaaactagacagaatcattcccacaaactgcgttgtgatgtgttcgttcaactcacagagtttaacctttctgttcatagagcagttaggaatcactctgtttgtaaagtctgtaagtggatattctgacatcttgtggccttcgtttgaaaagggatttcttcatattctgctagacagaagaattcccagaaacttcgttgtgttgtgtgttttcaactcacagagttcaacgatcctttacacagagtagacttgaaacactctttttgtggaattggcagggtggagatttcagccgctttgaggtcaatggtagaaaaggaaatatcttcgtataaaaactagacagagtgattctcagaaactcctttgtgatgtgtgcgttcaactcacagagttaaacctttcttttcatagagcagttaggaaacactctgtttgtaaagtctgcaagtgggtattcagacatccttgaggctttcgttggaaacgggatttcttcatattctgctagaaagaaggattcccagtaacttccttgtgttgtgtgtgttcaactcacagagttgaactttcatttacaaagagcagatttgaaacactctttttgtggaatttgcaattggagatttcaagcgctttgagaccaaaggcagaaaaggaaatatcttcgtataaaaactagacagaatcattctcagaaactgctctgcgatgtgtgcgttcaactctcagagtttaacttttcttttcattcagcagtttggaaacactctgtttgtaaagtctgcacgtggatattttgaccacttacaggccttcgttggaaacgggtttttttcatgtaaggctagacagaagaattcccagtaacttccttgcgttgtgtgcattcaactcacagagttgaacgttcccttagacagagcagatttgaaacactgtttttgtgcaatttgcaagtggagatttcaagtgctttaaggtcaatggcagaaaaggaaatatcttcgtttcaaaactagacagaatcattcccacaaactgcgttgtgatgtgttcgttcaactcacagatttaaacttttcttttcatagagcagttaggaaacactctgtttgtaaagtctgtaagtggatattctgacatcttgtggccttattggaaacgggatttcttcatattctgctagacagaagaattctcagtaacttccttgtgttgtgaggattcaactcacagagttgaacgatcctttacacagagcagacttgaaacactctttttgtggaatttgcaagtggagatttcagccgctttgaggtcaatggtagaaaaggaaactatcttcatataaagactagacagaatgattctcagaaactcctttgtgatgtgtgtgttcaactcacagagtttaacctttcttttcatagagcagttagtaaacactctgtttataaagtctgcaagtggatattcagaccccttggaggccttcgttggaaacgggatttcttcatattatgctagacagaagaattctcagtaacttccttgtgttgtgtgtattcaactgacagagttgaactttcatttagagagagcagatttgaaacactgtttttgtggaatttgcaattggagatttcaagcgctttggggccaaaggcagaaaaggaaatatcttcgtataaaaactagacagaatcattctcagaaactgctctgcgatgtgtgcgttcaactctcagagtttaatttttcttttcattcagcagtttggaaacactctgtttgtaaagtctgcacgtggataatttgaccacttagaggccttcgttggaaacgggtttttttcatgtaaggctagacagaagaattctcagtaacttccttgtgttgtgtgtattcaactcacagagttgaacgatcctttacacagagcagacttgtaacactctttttgtggaatttgcaagtggagatttcagcctctttgaagtcaaaggtagaaaaggaaatatcttcctataaaaactagacagaatgattctcagaaactcctttgtgatgtgtgtgttcaactcacagagtttaaccttttttttcatagagcagttagtaaacactctgtttataaagtctgcaagtggatattcagacccctttgaggccttcgttggaaacgggatttcttcatattatgctagacagaagaattctcagtaacttccttgtgttgtgtttattcaactcacagagttgaatgatcctttacacagagcagacttgaaacactctttttgtggaatttgcaagtggaggtttcagccgctttgaggtcaatggtagaaaagtaaatatcttcgtataaagactagacagaatgattctcagaaactcctttgtgatgtgtgcgttcaactcacagagtttaacctttctgttcatagagctgttaggaaacactctgtttgtaaagtctgcaagtggatattcagacctcctttaggccttcgttggaaacgggatttcttcatattctgctagacagaagaattctcagtaacttccttgtgttgtgtgtattcaactcacagagttgaacgatcctttacacagagcagacttgaaacactctttttgtggaatttgcaagtggagatttcagccgctttgaggtcaatagtagaaaaggaaatatctttgtagaaaaactagacagaatgattctcagaaactcctttgtgatgtgtgcgttcaactcacagagtttaacctttcttttcatagagcagttaggaaacactctgtttgtaaagtctgcaagtggatattcagacctctttgaggccttcgttggaaacgggtttttttcctataaggctagacagaagaattcccagtaacttccttgtgttgtgtgcattcaactcacagagttgaacgttcccttagacagagcagatttgaaacactctatttgtgcaatttgcaagtgtagatctcaagcgctttaaggtcaatgggagaaaaggaaatatcttcgtttcaaaactagacagaatcattcccacaaactgcgttgtgatgtgttcgttcaactcacagagtttaacctttctgttcatagagcagttaggaaacactctgtttgtaaagtctgtaagtggatattctgacatcttgtggccttcgttggaaacggtatttcttcctattctgctagacagaagaattctcagtaacttccttgtgttgtgtgtattcaactcacatagttgaacgatcctttacacagagcagacttgaaacactctttttgtggaatttgcaagtggagatttcagccgctttgaggtcaatagtagaaaaggaaatatcttcgtagaaaaactagacagaatgattctcagaaactcctttctgatgtgtgtgttcaactcacagagtttaacctttcttttcatagagcagttagtaaacactctgtttataaagtctgcaagtggatattcagaccccttggaggccttcgttggaaacgggttttcttcatattatgctagacagaagaattcccagtaacttccatgtgttatgtgtgttcaactcacagagttgaactttcatttacacagagcagatttgaaacactctttttgtggaatttgcaaatggagatttcaagcgctttgaggccagaggcagaaaaggaaatatcttcgtttaaaaactagacagaatgattctcagaaactcctttgtgatgtgtgcgttcaactcacagtagtttaacctttcttttcatagagcagttaggaaacactctggttgtaaagactacaagtggatattcagacctctttgaggccttcgttggaaacgggtttttttcctgtaagtctagacagaagaattcccagtaacttccttgtgttgtgtacattcaactcacagagttgaacgttcccttagacagagcagatttgaaacgctctttttgtgcaattggcaagtggagatttcaagcgctttaaggtcaatggcagaaaaggaaatatcttcgtttcaaaactagacagaatgattctcagaaaatcttttgtgatgtgtgcgttcaactcacagagtttaacttttcttctcatagagcagttaggaaacactctgtaaagtctgcaagtggatattcagacctctttgaggccttcgttggaaacgggatttcttcatattatgctagacagaataattctcagtaacttccttgtgttgtgtgtattcaactcacagagttgaaggatcctttacagagagcaggcttcaaacactctttttgtcgaatttgcaagtggagatttcagccgctttgaggtcaatggtagaataggaaatatcttcttatagaaactagacagaatgattctcagaaactcctttgtgatgtgtgcgttcaaatcacagagtttaacttttcttttcatagagcagttaggaaacactctgtttgtaaagtctgcaagtggatattcagacctctttgaggccttcgttggaaacgggatttcttcatattatgctagacagaagaattctcagtaacttccttgtgttgtgtgtattcaactcacagagttgaatgatcctttacacagtacagtcttgaaacactctttttgtggaatttgaaagtggagatttcagccgctttgaggtcaatggtagaataggaaataccttcctatagaaactagacagaatcattctcagaaactgctctgtgatgtgtgcgttcaactctcagagtttaacttttcttttcattcagcagtttggaaacactctgtttgtaaagtctgcacgtggatattttgaccacttagaggccttcgttggaaacgggttttttttcatgtaaggctagacggtagaattcccagtaacttccttgtgttgtgtacattcaactcacagagttgaacgttcccttagacagagcagatttgaaacactctttttgtgcaattggcaagtggagatttcaagcgctttaaggtcaatggcagaaaaggaaatatcttcgtttcaaaactagacagaatgattctcagaaaatcttttgtgatgtgtgcgttcaactcacagagtttaacttttcttctcatagagcagttaggaaacactctgtttgtaaagtctgcaagtggatattcagacctctttgtggccttcgttggaaacgggatttcttcatattatgctagacagaataattctcagtaacttccttgtgttgtgtgtattcaactcacagagttgaaggatcctttacagagagcaggcttgcaacactctttttgtcgaatttgcaagtggagatttcagccgctttgaggtcaatggtagaataggaaatatcttcttatagaaactagacagaatgattctcagaaagtcctttgtgatgtgtgtgttcaactcacagagtttaacctttctattcatagagtagttaggaaacactctgtttgtaaagtctgcaagtggatattttgacctctttgaggccttctttggaaacgggtttttttcatataaggctagacagaagaattcccagtaacttccttgtgttttgtgtgttcaactcacagagttgaactttcatttacacagagcagatttgaaacactctttttgtggaatttgcaagtggagatttcaagcgctttgaggccaaaggcagaaaaggaaatatcttcgtataaaaactagacagaatcattctcagaaactgctctgcgatgtgtgcgttcaactctcagagtttaacttttcttttcattcagaagtttggaaacactctgtttgtaaagtctgcacgtggataacttgaccacttagaggtcttcgttggaaacgggtttttttcatgtaaggctagacagaagaattctcagaatcttccttgtgttgtgtgtattcaactcacagagttgaacgatggtttacacagagcagatttgaaacactcttttggtggaatttgcatgtggagatttcagccgccttgaggtcaatggtagaaaaggaaatatcttcgtataaaaactagacagaatgattctcagaaacttctttgtgatgtgtgcgttcaactcacagagtttaacctttcttttcatagaacagttaggaaacactctgtttgtaaactctgcaagtggatattcagacctctttgaggccttcgttggaaacgggatttcttcatactatgctatatagaagaattctcagtaacttccttgtgttgtgtgtattcaactcacagagttgaacgatcctttacacagagcagacctgaaacactctttttgtggaatttgcaagtggagatttcagccgctttgaggtcaatggtagaataggaaatatcttcctatagaaactagacagaatgattctcagaaactcctttgtgatgtgtgcgttcaactcacagagtttaacctttcttttcatagagcagttaggaaacactctgtttgtaaagtctgcaagtggatattcagacatctttgaggccttcgttggaaacgggatttcttcatgttctgctagacagaagaattctcagaaactttccttgtgttgtgtgttttcaactcacagagttgaacgatgctttacacagagtagacttgaaacactctttttgtgtaatttgcaagtggagatttcagccgctttgaagtcaatggtagaaaaggaaatatcttcgtataaaaactagacagaatcattctcagaaactgctgcgtgatgtgtgcgttcaactctcagagtttaacttttcttttcattcagcggtttggaaacactctgtttgtaaagtctgcacgtggaaattttgaccacttagaggccttcgttggaaacgggtttttttcatgtaaggctagacagaagaattcccagtaacttccttgtgttgtgtgcattcaactcacagagttgaacgttcccttagacagagaagatttgaaacactctatttgtgcaatttccaagtgtagatttcaagcgctttaaggtcaacggcagaaaaggaaatatcttcgtttcaaaactagacagaatcattcccacaaactgcgttgtgatgtgttagttcaactcacagagtttaacctttcttttcatagagcagttaggaaacagtctgtttgtcaattctgtaagtggatattctgacatcttgtggccttcgttggaaacgggatttcttcatattctgctagacagaagaattctcagaaacttccttgtgttctgtgtattcaactcacagagttgaacgatcctttacacagagcagacttgaaacactctttttgtggaatttgcaagtggagatttcagtcgctttgaggtccatggtagaaaaggaaatatcttcgtataaaaactagacagaatgattctcagaaactgctttgtgatgtgtgcgttcaactcacagagtttaacctttcttttcatagagcagttaggaaacactctgtttgtaaagtctgcaagtggatattcagacatctttgaggctttcgttggaaacgggatttcttcatattctgctagacagaagaattcccagtaacttccttgtgttgtgtgtgttcaactcacagagttgaactttcattaacacagagcagatttgaaacactctttttgtggaatttgcaagtggagatttcaagcgctttgaggccaaaggcagaaaaggaaatgtcttcgtttcaaaactagacagaatcattctcagaaactgctctgcgatgtgtgagttcaactctcagagtttaacttttcttttcattcagcagtttggaaacactctgtttgtaaagtctccacgtggatattttgaccatttagaggctttcgttggaaacgggtttttttcttgtaaggctagacagaagaattcccaggaacttccttgtgttgtgtacattcaactcacagagttgaacgttcccttagacagagcagatttgaaacactctttttgtgcaattggcaagtggtgatttcagccgctttgaggtcaatggtagaaaaggaaatatcttcgtataaaaactagacagaattattctcataaactcctttgtgatgtgtgcgttcaactcacagagtttaacctttcttttcatagagcagttaggaaacactctgtttgtaaagtctgcaagtggatattcagacctctttgaggccttcgttggaaacgggatttcttcatattctgctagacagaagaattctcagaatcttccttgtgttgtgtgtattcaactcacacagttgaacgattgtttatacagagcagatttgaaacactctttttgtggaatttgcaagtggagatttcagccgctttgaggtcaatggtagaaaaggaaatatcttcgtataaaaactagacagaatgattctcagaaacttctttgtgatgtgtgcgttcaactcacagagtttaacctttcttttcatagagcagttaggaaacactctgtttgtaaactctgcaagtggatattcagacctctttgaggccttcgttggaaacgggatttcttcaaactatgctagacagaagaattctcagaatcttccttgtgttgtgtgttttcaactcacagagttgaacgatcctttacacagagcagacttgaaacactccttttgtggaatttgcaagtggagatttcagccgctttgaggtcaatggtagaataggaaatatcttcgtatagaaagtagacagaatcattctcagaaactgctctgcgatgtgtgcgttcaactctcagagtttaacttttcttttcattcagcagtttggaaacactctgtttgtaaagtctgcacgtggatattttgaccacttagaggccttcgttggaaacgggtttttttcctgtaaggctggacagaagaattcccagtaacttccttgtgttgtgtacattcaactcacagagttgaacgttcccttagacagagcagatttgaaacactctttttgtgcaattggcaagtggagatttcaagcgctttaaggtcaatggcagaaaaggaaatatcttcgtttcaaaactagacagaatcattcccacaaactgcgttgtgatgtgttcgttcaactcacagagtttaacctttcttttcatagagcagttaggaaacactctgttggtaaattctgtaagtggatattctgacatcttgtggcctccgttggaaacgggatttcttcatattctgctagacagaagaattctcagaatcttcccttgtgttgtgtgtattcaactcacagagttgaacgatcctttacacagagcagacttgaaacactctttttgtggaatttgcaagtggacatttcagccgctttgaggtccatggtagaaaaggaaatatcttcgtacaaaaactagacagaacgattctcagaaactcctttgtgatgtgtgcgttgaactcacagagtttaacctttcttttcatagagcagttaggaaacactctgtttgtaaagtctgcaagtggatattcagacctctttgaggccttcgttggaaacgggatttcttcatattctgctagacagaagaattctcagtaacttccttgtgttgtgtgtattcaactgacagagttgaactttcatttagagagagcagatttgaaacactgtttttgtggaatttgcaaatggtgacttcaagcgctttggggccaaacgcagaaaaggaaatatcttcgtataaaaactagacagaatcattctcagaaactgctctgtgatgtgtgcgttcaactctaagagtttaacttttcttttcattcagcagtttggaaacactctgtttgtaaagtctgcacgtggatattttgaccacttagaggccttctttggaaacgggttttttttcatgtaaggctagacagaagaattcccagtaacttccttgtgttgtgtacattcaactcacagagttgaacgttcccttagacagagcagatttgaaacactctttttgtgcaattggcaaatggagatttcaagcgctttaaggtcaatggcagaaaaggaaatatcttcgtttcaaaactagacagaatcattcccacaaactgcgttgtgatgtgttcgttcaactcacagagtttaacctttctgttcatagagcagttaggaaacactctgtttgtaaagtctgtaagtggatattctgacatcttgtagccttcgttggaaacgggatttcttcatattctgctagacagaagaattctcagtaacttccttgtgttgtgtgcattcaactcacagagttgaaagatcctttacacagagcaggttagaaacaatatttttgtggattttgcaagtggagatttcagccactttgaggtcaatggtagaaaaggaaatatcttcataaaaaaactacacagaatgattctcagaaactcctttgtgatgtgtgtgttcaactcacagagtttaacgtttcttttcatagagcagttagtaaacactctgtttataaattctgcaagtggatattcagacctctttgaggtcttcgttggaaacgggatttcttcatattatgctagacagaagaattctcagtaacttccttgtgttgtgtgtattcaactgacagagttgaactttcatttagagagagcagatttgaaacactgtttttgtgcaatttgcaagtggagatttcaagcgctttggggccaaaggcagaaaaggaaatatcttcgtataaaaactagacagaatcattctcagaaactgctgcgtgatgtgtgcgttcaactctcagagtttaacttttcttttcattcagcggtttggaaacactctgtttataaagtctgcacgtggatattttgaccacttagaggccttccttggaaacgggtttttttcatgtaaggctagacagaagaattcccagtaacttccttgtgttgtgtgcattcaactcacagagttgaacgttcccttagacagagcagatttgaaacactctatttgtgcaatttgcaagtgtagatttcaagcgctttaaggtcaacggcagaaaaggaaatatcttcgtttcaaaactagacagaatgattctcagaaactcctttgtgatgtgtgcgttcaactcacagagtttaacctttctgttcatagagcagttaggaaacactctgtttgtaaagtctgcaagtggatattcagacctccttgaggccttcgttggaaacgggatttcttcatattgtgctagacagaagaattctcagaatcgtccttgtgttgtgtgtattcaactcacagagttgaacgatggtttacacagagcagatttgaaacactctttttgtggaatttgcaagtggagatttcagccgctttgaggtcaatggtagaaaaggaaatatcttcgtataaaaactagacagagtgattctcagaaactcctttgtgatgtctgcgttcaactcacagagtttaacctttcttttcatagagcagttaggaaacactctgtttgtaaagtctgcaagtggatattcagacctctttgaggccttcgttgaaaacgggatttcttcatattctgctagacagaagaattctcagtaacttccttgtgttgtgtgtattcaactcacagagttgaacgatcctttacacagagcagacttgaaacactctttttgtggaatttgcaagtggagatttcaagcgctttggggccaaaggcagaaaaggacatatcttcgtataaaaactagacagaatcattctcagaaactgctgcgtgatgtgtgcgttcaactctcagagtttaacttttcttttcattcagcggtttggaaacactctgtttgtaaagtctgcacgtggatattttgaccacttagaggtcttcgttggaaacgggtttttttcatgtaaggctagacagaagaattctcagtaacttccttgtgttgtgtgtattcaactcagagagttgaacgatcctttacacagagcagacttgaaacactctttttgtggaatttgcaagtggagatttcagccgctttgaggtcaatggtagaataggaaatattttcctatagaaactagacagaatgattctgagaaactcctttgtgatgtgtgcgttcaactcacagagtttaacctttcttttcatagaacagttaggaaacactctgtttgtaaagtctgcaagtggatattcagacctccttgaggccttcgttggaaacgggatttcttcatattatgctagacagaagaattctcagtaacttccttgtgttgtgtgtattcaactcacagagttgaacgatcctttacacagagtagacttgaaacactctttttgtggaatttgcaagtggagatttcagccgctttgaggtcaatggtagaataggaaatatcttcctatagaaagtagacagaatgattctcagaaactcctttgtgatgtgtgcgttcaactcacagagtttaacctttcttttcatagagcagttaggaaacactctgtttgtaaagtctgcaagtggatattcagacctccttgaggccttcgttggaagcgggatttcttcatgttctgctagacagaagaattctcagtaacttccctgtgttgtgtgtattcaactgacagagtcgaactttcatttagagagagcagatttgtaacactgtttttgtggaatttgcaagtggagatttcaagcgctttggggccaaaggcagaaaaggaaatatcttcgtataaaaactagacagaatcattctcagaaactgctctgcgatgtgtgcgttcaactctcagagtttaacttttcttttcattcagcagtttggaaacactctgtttgtaaagtctgcacgtggatattttgaccacttagaggccttcgttggaaacgggttttttcctgtaaggctagacagaagaattcacagtaacttccttgtgttgtgtacattcaactcacagagttgaacgttcccttagacagagcagatttgaaacactctttttgtggaatttgcaagtggagatgtcaagcgctttgaggccaaaggcagaaaaggaaatatcttcgtttcaaaactagacagaatgattctcagaaactcctttgtgatgtgtgcgttcaactcacagagtttaacctttcttttcatagagcagttaggaaacactctgtttgtaatgtctgcaagtggatattcagacatccttgaggctttcgttggaaacgggatttcttcatattctgcaagaaagaagaattctcagtaacttccttgtgttgtgtgtattcaactcacagagttgaatgatcctttacacagaacagtcttgaaacactctttttgtggaatttgcaagtggagatttcagcctctttgaggtctatggtagaataggaaatatcttcctatagaaactagacagaatgattctcagaaactcctttgtgatgtgtgcgttcaactcacagagtttaacctttcttttcatagagcagttaggaaacactctgtttgtaatgtctgcaagtggatattcagacctctttgaggccttcgttggaaacgggtttttttcatataaggctagacagaagaattcccagtaacttccttgtgttgtgtgtgttcaactcacagagttgaactttcatttacacagcgcagatttgaaacactctttttgtggaatttgcaagtggagatttcaagcgctttgaggccaaaggcagaaaaggaaatatcttcgtttcaaaactagacagaatcattctcagaaactgctctgcgatgtgtgcattcaactctcagagtttaatttttcttttcattcagcagtttggaaacactctctttgtaaagtctgcacgtggatattttgaccacttagaggccttcgttggaaacgggttttattcttgtaaggctagacagaagaattcccagtaacttccttgtgttgtgtacattcaactcacagagttgaacgttcccttagacagagcagatttgaaacactctttttgtgcaattggcaagtggagatttcaagcgctttaaggtcaatggcagaaaaggaaatatcttcgtttcaaaactagacagaatcattcccacaaactgcgttgtgatgtgttcgttcaactcacagagtttaaccttccttttcatagagcagttaggaaacagtctgtttgtaaattctgtaagtggatattctgacatcttgtggccttcgttggaaacgggatttcttcatattctgctagacagaagaattctcagtaactgccttgtgttgtgtgtattcaagtcacagagttgaacgatcctttacacagagcagacttgaaacactctttttgtggaatttgcaagtggagatttcagccgctttgaggtcaatggtagaataggaaatatcttcctatagaaactagacagaatgattctcagaaactcctttgtgatgtgtgcgttcaactcacacagtttaacctttcttttcatagagcagttgggaaacactctgtttgtaaagtctgcaagtggatattcagacctccttgaggccttcgttggaaacgggatttcttcatattatgctaggcagaagaattcccagtaacttccttgtgttgtgtgtgttcaactcacagagttgaacttttatttacacagagcagatttgaaactctctttttgtggaatttgcaattggagatttcaagcgctttgaggccaaaggcagaaaaggaaatatcttcgtataaaaactagacagaatcactctcagaaactgctctgcgatgtgtgcgttcaactctcagagtttaacttttcttttcattcagcagtttggaaacactctgtttgtaaagtctgcacgtggatattttgaccactcagaggccttcgttggaaacggttttttttcctgtaaggctagacagaagaattcccagtaacttccttgtgttgtgtgcattcaactcacagagttgaacgttcccttagacagagcagatttgaaacactctatttgtgcaatttgcaaatgtagatttcaagcgctttaaggtcaatggcagaaaaggaaatatcttcgtttcaaaactagacagaatcattcccacaaactgcgttgtcatgagttcgttcaactcacagagtttaacctttcttttcatagagcagttaggaaacagtctgtttgtaaattctgtaagtggatattctgacatcttgtggccttcgttggaaacgggatttcttcatattctgctagacagaagaattctcagtaacttccttgtgttgtgtgtattcaactcacagagttgaacgatcctttacacagagcagacttgaaacactctttttgtggaatttgcaagtggagatttcagccgctttgaggtcaatggtagaaaaggaaatatcttcgtatgaagactagacagaatgattctcagaaactcctttgtgatgtgtgtgttcaactcacagagtttaacctttcttttcatagagcagttagtaaatactctgtttatacagtctgcaagtggatattcagacccctttgaggccttcgttggaaacgggatttcttcatattatgctagacagaagaattcccagtaacttccttgtgttgtgtgtgttcaactcacagagttgaactttcatttacacagagcagatttgaaacactctttttgtggaatttgcaagtggagatttcaagcgctgtgaggccaaaggcagaaaaggaaatatcttcgtataaaaactagacagaatcattctcagaaactgctgcgtgatgtgtgcgttcaactctcagagtttaacttttcttttcattcagcggtttggaaacactctgtttgtaaagtctgcacgtggatattttgaccacttagaggccttcgttggaaacgggttttttttcatgtaaggctacacagaagaattcccagtaacttccttgtgttgtgtgcattcaactcacagagttgaacgttcccttagacagagcagatttgaaacactctatttgtgcaatttgcaagtgtagatttcaagcgctttaaggtcaatggcagaaaaggaaatatcttcgtttcaaaactagacagaatgattctcataaactcctttgtgatgtgtgcgttcaactcaccgagtttaacctttcttttcatagagcagttaggaaacactctgtttgtaaagtctgcaagtggatattcagacctccttggggccttcgttggaaacgggatttcttcatattctgctagacataagaattctcagtaacttccttgtgctgtgtgtattcaactcacagagttgaacgatcctttacacagagcatacttgtaacactcttcttgtggaatttgcaagtggagatttcagccgctttgaggtcaatggtagaataggaaatatcttcgtataaaaactagacagaatgattctcagaaactcctttgtgatgtgtgcgttcaactcacagagtttaacctttcttttcatagagcagttaggaaacactctgtttgtaaagtctgcaagtggatattcagacctctttgaggccttcgttggaaacgggttttttacatataaggctaaacagaagaattcccagtaacttccttgtgttgtgtgtgttcaactcacagagttgaactttcatttacacagagcagatttgaaacactcattttgtggaatttgcaagtggagatttcaagcgctttgaggccaaaggcagaaaaggaaatatcttcgtttcaaaactagacagaatcattctcagaaactgctctgcgatgtgtgcgttcaactctcagagtttaacttttcttttcattcagcagtttggaaacactctgtttgtaaagtctgcacgtggataatttgaccacttagaggccttcgttggaaacgggtttttttcatgtaaggctagacagaagaattcccagtaacttccttgtgttgtgtgcattcaactcacagagttgaacgttcctttagacagagcagatttgaaacactctatttgtgcaatttgcaagtgtagatttcaagcgctttaaggtcaacggcagaaaaggaaatatcttcgtttcaaaactagacagaatcattcccacaaactgcgttgtgatgtgttcgttcaactcacagagtttaacctttcttttcatacagcagttaggaaacactctgtttgtaaactctgcaagtggatattcagacctctttgaggccttcgatggaaacgggatttctccatactatgctagacagaagaattctcagtaacttccttgtgttgtgtgtattcaactcacagagttgaacgatcctttacacagagcagacttgaaacactctttttgtggaatttgcaagaggagatttcagccgctttgaggtcaatagtagaaaaggaaatatcttcgtagaaaaactagacagaatgattctcagaaactcctttgtgatgtgtgcgttcaactcacagagtttaacctttcttttcatagagctgttaggaaacactctgtttgtaaagtctgcaagtggatattcagaactctttgaggccttcgttggaaacgggatttcttcttattctgctagagagaagaattcccagtaacttccttgtgttgtgtgtgttcaactcacagagttgaactttcatttacacagagcagatttgaaacactctttttgtggaatttgcaagtggagatttcaagcgctttgagaccaaaggcagaaaaggaaatatcttcgtataaaaactagacagaatcattctaagaaactgctctgcgatgtgtgcgttcaactctcagagtttaacttttcttttcattcagcagtttggaaacactctgtttgtaaagtctgcacgtggataacttgaccacttagaggccttcgttggaaacgggtttttttcatgtaaggctagacagaagaattcccagtaacttccttgtgttgtgtgcattcaactcacagagttgaacgttcccttagacagagcagatttgaaacactctatttgtgcaatttacaagtgtagttttcaagctctttaaggtcaacggcagaaaaggaaatatcttcgtttcaaaactagacagaatcattcccacaaactgcgttgtgatgtgttcgttcaactcagagagtttaacctttctgtacatagagcagttaggaaacactctgtttgtaaagtctgtaagtggatattctgacatcttgtggccttcgttggaaacgggatttcttcatattctgctagacagaagaattctcagtaacttccttgtgttgtgtgtattcaactcacagagtcgaacgatcctttacacagagcggacttgaaacactcgttttgtggaatttgcaagtggagatttcagccgatttgaggtcaatggtagaaaaggaaatatcttcgtataaaaactagacagagtgattctcagaaactcctttgtgatgtctgcgttcaactcacagagtttaacctttcttttcatagagcagttaggaaacactctgtttgtaaagtctgcaagtggatattcagacctccttgaggccttcattggaaacgggatttcttcatattctgctatacaaaagaattctcagaaacttccttgtgttgtgtgtattcaactcacagagttgaacgatcgtttacacagagcagacttgagacactctttttgtggaatttgtaagtggagatttcagccgctttgaggtcaatggtagaaaaggaaatatcttcatataaaaagtagacagaatgattctcagaatctcctttgtgatgtgtgcgttcaactcacagagtttaacctttcttttcatagagcagttaggaaacactctgtttgtaaagtctgcaagtggatattcagacctctttgaggccttcgttcgaaacgggttttcttcatattatgctagacagaagaattcccagtaacttccttgtgttgtgtgcattcaactcacagagttgaacgttcccttagacagagcagatttgaaacactctatttgtgcaatttgcaagtgtagatttcaagcgctttaaggtcaacggcagaaaaggaaatatcttcgtttcaaaactagacagaatgattctcagaaacttcattgtgacgtgttcgttcaactcacagagtttaacctttcttttcatagagcagttaggaaacactctgtttgtaaagtctgcaagtggatattcagacctctttgaggccttcgttggaaacgggatttcttcatactgtgctagacagaagaattctcagtaacttccttgtgttgtgtgtattcaactcacagagttgaacgatcctttacacagagcggacatgaaacacactttttgtggaatttgcaagtggagatttcagccgcgttgaggtcaatggtagaaaaggaaatatcttcgtataaaaactagacagaatgattctcagaaactcctttgtgatgtgtgtgtccaactcacagagtttaacctttcttttcatagagcagttaggaaacactctgtttgtaaagtctgcaagaggatattcagacctctttgaggccttcgttggaaacgggtttttttcatataaggctagacagaagaattcccagtaacttccttgtgttgtgtgtgttcaactcacagagttgaactttcatttacacagagcagatttgaaaccctctttttgtggaatttgcaaatggagatttctgccgcgttgaggtcaatggtagaaaaggaaatatcttcgtttcaaaactagacagaatcattctcagaaactgctctgcgatgtgtgcgttcaactcttagagtttaacttttcttttcagtcagcagtttggaaacactctgtttgtaaagtctgcacgtggatattttgaccacttagaggccttcgttggaaacgggtttttttcctgtaacgctagacagaagaattcccagtaacttccttgtgttgtgtgcattcaactcacagagttgaacgttcccttagacagagcagatttgaaacactctatttgtgcaatttgcaagtgtagatttcaagcgctttaaggtcaatggcagaaaaggaaatttcttcgtttcaaaactagacagaatgattctcagaaactcctttgtgatgagtgtgttcaactcacagagtttaacctttcttttcatagagcagttaggaaacactctgtttgtaaactctgcaagtggatattcagacctctttgaggccttcgttggaaacgggatttcttcatactgtgctagacagaagaattctcagtaacttccttgtgttgtgtgtattcaactcacagagttgaacgatcctttacacagagcggacttgaaacactctttttgtggaatttgcaagtggagatttcagccgcgttgaggtcaatggtagaaaaggaaatatcttcgtataaaaactagacagaatgattctcagaaactcctttgtgatgtgtgccgttcaactcacagagtttaacctttctttacatagagcagttaggaaacactctgtttgtaaagtctgcaagtggatattcagacctctttgaggccttcgttggaaacgggtttttttcatataaggctagacagaagaattctcagtaacttccttgtgttgtgtgtattcaactgacagagttgaactttgatttagagagagcagatttgaaacactgtttttgtggaatttgcaggtggagatttcaagcgatttggggccaaatgcagaaaaggaaatatcttcgtataaaaactagacagaatcattctcagaaactgctgcttgatgtgtgcgttcaactcacagagtttaacttttcttttcattcagcggtttggaaacactctgtttgtaaagtctgcacgtggatattttgaccacttagaggccttcgttggaaacgggattttttcatgtaaggctagacagaagaattcccagtaacttccttgtgttgtgtgcattccactcacagagttgaacgttcccttagacagagcagatttgaaacactctatttgtgcaatttgcaaatgtagatttcaagcgctttaaggtcaatggcaggaaaggaaatatcttcgtttcaaaactagacagaatgattctcagaaacttctttgtgatgtgtgcgttcaactcacagagtttaacctttcttttcatagagcagttaggaaacagtctgtttgtcaattctgtaagtggatattctgacatcttgtggccttcgttggaaacgggatttcttcatactatgctagacagaagaattctcagtaacttccttgtgttgtgtgtattcaactcacagagttgcacgatcctttacacagagcagacttgaaacactctttttgtggaatttgcaagtggagatttcagccgctttgaggtcaatggtagaataggaaatatcttcctatagaaactagacagaatgattctcagaaactcctttgcgatgtgtgcgttcaactcacagagtttaacctttcttttcatagagcagttaggaaacactctgtttgtaaagtctgcaaggggatattcagacctctttgaagccttcgttggaaacgggatttcttcatgttatgctagacagaagaattcccagtaacttccttgtgttgtgtgtgttcaactcacagagttgaactttcatttacacagagcagatttgaaacactctttttgtggaatttgcaaatggagatttcaagcgctttgaggccaaaggcagaaaaggaaatgtcttcgtttcaaaactagacagaatcattctcagaaactgctgcgtgatgtgcgcgttcaactctcagaatttaacttttcttttcattcagcggtttggaaacactctgtttgtaaagtctgcacgtggatattttgaccacttagaggccttcgttggaaacgggttttttgcatgtaaggctagacagaagaattctcagtaacttcccttgtgttgtgtgcattcaactcacagagttgaacgttcccttagacagagcagatttgaaacagcctatttttgcaatttgcaagtgtagatttcaagcgctttaaggtcaacggctgaaaaggaaatatcttcctttcaaaactagacagaacgattctcagaaactcctttgtgatgtgtgcgttcaactcatagagtttaacctttcttttcatagagcagttaggaaacactctgtttgtaaagtctgcaagtggatattcagacctctttgaggccttcgttggaaacgggatttcttcatattctgctagacagaagaattctcagtaacttccttgtgttgtgtgtattcaactcacagagttgaacgatcctttacacagagcagacttgaaacactctttttgtggaaattgcaattggaggtttcagccgctttgaggtcaatggtagaaaaggaaatatcttcgtataaaaactagacagaatgattctcagaaactcctttgtgatgtgtgcgttcaactcacagagtttaacctttctgttcatagagcagttaggaaacactctgtttgtaaagtctggaagtggatattcagacctccttgaggccttcgttggaaacggtatttcttcatattctgctagacagaagaattctcagtaacttccttgtgttgtgtgtattcaactgacagagttgaactttcatttagacagagcagatttgaaacactctttttgtggaatttgcaaaggtagatttcatgcgctttgaggccaaaggcagaaaaggaaatatcttcgtataaaaactagacagaatcattctcagaaactgctctgcgatgtgtgcgttcaactctcagagtttaacttttcttttcattcagcagtttggaaacactctgtttgtaaagtctgcaagtggatgttttgaccacttagaggccttcgttggaaacgggtttttttcatgtaaggctagacagaagaattcccagtaacttccttgtgttgtgtgcattcaactcacagatttgaacgttcccttagacagagcagatttgaaacactctttttgtgcaattggcaagtggagatttcaagcgctttaaggtcaatggaagaaaaggaaatatcttcgtttcaaaactagacagaatcattcccacaaactgcgttgtgatgtgttcgttcaactcacagagtttaacctttcttttcatagagcagttaggaaacagtctgtttgtaaattctgtaagtggatattctgacatcttgtggccttcgttggaaacgggatttcttcatattctgctagacagaagaattctcagaaacttccttgtgttgtgtgttttcaactcacagagttgaacgatgctttacacagagtagacttgaaacactctttttgtgtaatttgcaagtggagatttcagccgctttgaggtcaatggtagaaaaggaaatatcttaatatagaaactagatagaatgattctcagaaactcctttgtgatgtgtgcgttcaactcacagagtttgacctttcttttcatagagcagttaggaaacactctgtttgtaaagtctgcaactggatattcagacctctttgaggccttcgttggaaacgggtttttttcatataaggctagacagaagaattcccagtaacttccttgtgttgtgtgtgttcaactcacagagttgaactttcatgtacacagagcagatttgaaacactctttttgtggaatttgcaagtggagatttcaagcgctttgaggccaaaggcagaaaaggaaataactccgtttcaaaactagacagaatcattctcagaaactgctctgcgatgtgtgcgttcaactcttagagtttaacttttcttttcattcagcagtttggaaacactctgtttgtaaagtctgcacgtggataatttgaccacttagaggccttcgttggaaacgggtttttttcatgtaaggctagacagaagaattcccagtaacttccttgtgttgtgtacattcaactcacagagttgaacgttcccttagacagagcagatttgaaacactctttttgtgcaattggcaaatggagatttcaagcgctttaaggtcaatggcagaaaaggaaatatcttcgtttcaaaaccagacagaatgattctcagaaactccttagtgatgtgtgtgtccaactcacagggtttaaactttcttttcatagagcagttagcaaacactctgtttgtaaagtctgcaagaggatattcagacctctttgaggccttcgttggaaacgggtttttttcatataaggctagacagaagaattcccagtaacttccttgtgttgtgtgtgttcaactcacagagttgaactttcatttacacagagcagatttgaaacactctttttgtggaatttgcaaatggagatttcagccgcgttgaggtcaacggtagaaaaggaaatatcttcgtttcaaaactagacagaatcattctcagaaactgctctgcgatgtgtgcgttcaactctcagagtttaacttttcttttcattcagcagtgtggaaacactgtgtttgtaaagtctgcacgtggatattttgaccacttacaggccttcgttggaaacgggtttttttcctgtaaggctagacagaagaattcccagtaacttccttgtgttgtgtgcattcaactcacagagttgaacgttcccttagtcagagcagatttgaaacactctatttgtgcaatttgcaagtgtagatttcaagcgctttaaggtcaatggcagaaaaggaaatatcttcgtttcaaaactagacagaatgattctcagaaactcctttgtgatgtgtgcgttcaactcacagagtttaacctttcttttcatagagcagttaggaaacactctggttgtaaagtctgcaagtggatattcagacctgcttgaggccttcgttggaaacgggatttcttcatattatgctagacagaagaattctcagtaacttccttgtgttgtgtgtactcaactcacagagttcaacgatcctttacacagagcagacttcaaacactctttttgtggaatttgcaagtggagatttcagccgctttgaggtcaatggtagaataggaaatatcttcctatagaaactagacagaatgattctcagaaactcctttgtgacgtgtgtgcccaactcacagagtttaacctttcttttcatagagctgttaggaaacactctgtttgtaaagtctgcaagaggatattcagacctctttgaggccttcgttggaaacgggtttttttcatataaggctagacagaagaattcccagtaacttccttgtgttgtgtgtgttcaactcacagagttgaactttcatttaaacagagcagatttgaaacactctttttgtggaatttgcaaatggagatttcagccgcgttgaggtcaatggtagaaaaggaaatatcttcgtttcaaaactagacagaatcattctcagaaactgctctgcgatgtgtgcgttcaactctcagagtttaacttttcttttcattcagcagtgtggaaacactctgtttgtaaagtctgcacgtggatattttgaccacttagaggccttcgttggaaacgggtttttttcctgtaaggctagacagaagaattcccagtaacttctttgtgttgtgtgcattcaactcacagagttgaacgttcccttagagagagcagatttgaaacactctatttgtgcaatttgcaagtgtagatttcaagcgctttaaggtcaatgacagaaaaggaaatatcttcgtttcaaaactagacagaatcattcccacaaactgcgttgtgatgtgttcgttcaactcacagagtttaacctttcttttcatagagcagttaggaaacactctgttggtaaattctgtaagtggatattctgacatcttgtggccttcgttggaaacaggatttcttcatattctgctacacagaagaattctcagtaacttccttgtgttgtgtgtattcaactcacagagttgaacgatcctttacacagagcggacttgaaacacactttttgtggaatttgcaagtggagatttcagccgctttgaggtccatggtagaaaaggaaatatcttcgtataaaaactagacagagtgattctcagaaactcctttgtgatgtctgcgttcaactcacagagtttaacgtttcttttcatagagcagttaggaaacactctgtttgtaaagtctgcaagtggatattcagacctccttgaggccttcgttggaaacgggatttcttcatattctgctatacagaagaattctcagtaacttccttgtgttgtgtgtattcaactgacagagttgaactttcatttagagagagcagatttgaaacactgttttggtggaatttgcaagtggagatttcaagcgatttggggccaaaggcagaaaaggaaatatcttcgtataaaaactagacagaaatcattctcagaaactgctctgcgatgtgtgcgttcaactctcaggagtttaacttttcttttcattcagcagtttggaaacactctgtttgtaaagtctgcacgtggatattttgaccacttagaggccttcgttggaaacgggtttttttcctgtaaggctagacagaagaattctcagtaactttccttgtgttgtgtgtattcaactgacagagttgaactttcatttagagagagctgatttgaaacactgtttttgtggaatttgcaagtggagatttcaagcgctttggggccaaaggcagaaaaggaaatatcttcgtataaaaactagacagaatcattctcagaaactgctctgcgatgtgtgcgttcaactctcagtgtttaacttttcttttcattcagcagtttggaaacactctgtttgtaaagtctgcacgtggataatttgaccacttagaggtcttcgttggaaacgggtttttttcatgtaaggctagacagaagaattctcagaatcttccttgtgttgtgtgtattcaactcacagagttgaacgatggtgtacacagagcagatttgaaacactctttttgtggaatttgcaagtggagatttcagccgctttgaggtaaatggtagaaaaagaaatatcttcgtataaaaactagacagaatgattctcagaaacttctttgtgatgtgtgcgttcaactcacagagtttaacctttcttttcatagagcagttaggaaacactctgtttgtaaactctgcaagtggatattcagacctctttgaggccttcgttggaaacgggtttttttcatgtaaggctagacagaagaattctcagtaacttccttgtgttgtgtgtattcaacttacagagttgaactttcatttacacagagcagatttgaaacactctttttgtggaatttgcaaatggagatttcaagcgctttgaagccaaaggcagaaaaggaaatatcttcctataaaaactagacagaatgattctcagaaactcctttgtgatgtgtgcgttcaactcacagagtttaacctttcttttcatagagcagttaggaaacactctgcttgtaaagtctgcaagtggatattcagccctctttgaggcctttgttggaaacgggtttttttcatataaggctagacagaagaattcccagtaacttccttgtgttgtgtacattcaactcacagagttgaacgttcccttagacagagcagatttgaaacactctttttgtgcaattggcaagtggagatttcaagcgctttaaggtcaatggcagaaaaggaaatatcttcgtttcaaaactagacagaatgattctcagaaactcctttgtgatgtgtgcgttcaactcacagagtttaacctttcttttcatagagcagttaggaaacactctgtttgtactgtctgcaagtggatattcagacatccttgaggctttcgttggaaacgggatttcttcatattctgctagaaagaagaattctcagtaacttccttgtgttgtgtgtattcaactcacagagttgaacgatcctttacacagagcagacttgaaacactctttttgtggaatttgcaagtggagatttcagccgctgtgaggtcaatggtagaataggaaatatcttcctatagaaactagacagaatgatactcagaaactcctttgtgatgtgtgtgttcaactcacagagtttaacctttcttttcatagagcagttagtaaacactctgtttataaagtctgcaagtggatattcagacccctttgaggccttcgttggaaacgggatttcttcatattatgctagaaagaagaattctcagtaacttccttgtgttgtgtgtattcaactgacagagttgaactttcatttagagagagcagatttgaaacactgtttttgtggaatttgcaagtggagatttcaagagctttgggtccaaaggcagaaaaggaaatatcttcgtacaaaaactagacagaatcattctcagaaactgctgcgtgatgtgtgggttcaactctcagagtttaacttttcttttcattcagcggtttggaaacactctgtttgtaaagtctgcacgtggatattttgaccacttagaggccttcgttggaaaagggtttttttcatgtaaggctagacagaagaattcccagtaacttccttgtgttgtgtgcattcaactcacagagttgaacgttcccttagacagagcagatttgaaacactctatttgtgcaatttgcaagtgtagatttcaagcgctttaaggtcaacggcagagaaggaaatatcttcgtttcaaaactagacagaacgattctcagaaactcctttgtgatgtgtgctttcaactcacagagtttaacctttcttttcatagagcagttaggaaacactctgtttgtaaagtctgcaagtggatattcagacctccttgaggccttcgttggaaacgggatttcttcatattctgctagacagaagaattctcagtaacttccttgtgttgtgtgtattcaactcacagagttgaatgatcctttacacagagcagacttgaaacactctttttgtggaatttgcaagtggagatttcagccgctttgaggtcaatggtagaaaagtaaatatcttcgtataaagactagacagaaatgattctcagaaacttctttgtgatgtgtgcgttcaactcacagaagtttaacctttcttttcatagagcagttgggaaacactctgtttttaaagtctgcaagtggatattcagacctctttgaggccttcgttggaaacgggtttttttcatgtaaggctagacagaagaattctcagtaacttccttgtattgtgtgtattcaactcacagagttgaacgatcctttacacagaacagacttgaaacactctttttgtggaatttgcaagtggagatttcagccgctttgaggtcaatggtagaataggaaatatcttcctatagaaactagacagaatgattctcagaaactcctttgtgatgtgtgcattcaactcacagagtttaacctttcttttcattgagcagttaggaaacactctgtttgtaaagtctgcaagttgatattcagacctctttgaggccttcgttggaaacgggatttcttcatattatgctagacagaagaattcccagtaacttccttgtgttgtgcacattcaactcacagagttgaacgttcccttagacagagcagatttgaaacactctttttgtgcaattggcaagtggtgatttcagcctctttgaggtcaatggtagaaaaggaaatatcttcgtataaaaactagacagaatgattctcagaaacttctttgtgatgtgtgcgttcaactcacagagtttaacctttcttttcatagagcagttaggaaacactctgtttgtaaactctgcaagtggatattcagacctgtttgaggccttctttggaaacgggatttcttcatactatgctagacagaagaattctcagtaacttccttgtgttgtgtgtattcaactcacagagttgaacaatcctttacacagagcagacttgtaacactctttttgtggaatttgcaagtggagatttcagccgctttgaagtcaaaggtagaaaaggaaatatcttcctataaaaactagacagaatgattctcagaaactcctttgagatgtgtgcgctcaactcacagagtttaacctttcttttcatagagcagttaggaaacactctgtttgtaaagtctgaaggtggatattcagacctctttgaggccttcgttggaaatgggttttttcatataaggctagacagaagaattcccagtaacttccttgtgttgtgtgtgttcaactcacagagttgaactttcatgtacacagagcagatttgaaacactctttttgtggaatttgcaaatggagatttcaagcgctttgaggccaaaggcagaaaaagaaatatcttcgtataaaaactagacagaaatcattctcagaaactgctctgcgatgtgtgcgttcaactctcaggagtttaacttttcttttcattcagcagtttggaaacactctgtttgtaaagtctgcacgtggatattttgaccacttagaggccttcgttggaaacgggtttttttcctgtaaggctagacagaagaattcccagtaacttccttgtgttgtgtgcattcaactcacagagttgaacgttcccttagacagagcagatttgaaacactctatttgtgcaatttgcaagtgtagatttcaagcgctttaaggtcaacggcagaaaaggaaatatcttcgtttcaaaactagacagaatgattctcagaaactcctttgtgatgtgtgcgttcaactcacagagttcaacctttcttttcatagagcagttgggaaacactctgtttgtaaagtctgcaagtggatattcagtcttctttgaggccttcgttggaagcgggatttcttcatattctgctagacagaagaattctcagtaactgccttgtgttgtgtgtattcaactcacagagttgaacgatcctttacacagagcagacttgaaacactctttttgtggaatttgcaagtggagatttcagccgctttgaggtcaatggtagaataggaaatatcttcctatagaaactagacagaatgattcttagaaactcctttgtgatgtgtgcgttcaactcacagagtttaacctttctgttcatagagctgttaggaaacactctgtttgtaaagtctgcaagtggatattcagacctcctttaggccttcgttggaaacgggatttcttcatattctgctagacagaagaattcccagtaacttccttgtgttgtgtgtgttcaactcacagagttgaactttgatttacacagagcagatttgaaacactctttttgtggaatttgcaagtggagatttcaagcgctttgaggccaaaggcagaaaagggaatatcttcgtataaaaactagacagaacgattctcagaaacttctttgtgatgtgtgcgttcaactcacagagttaaaactttcttttcatagagcagttaggaaacactctgtttgtaaagactgcacgtggatattcagacctctttgaggccttcgttggaaacgggtttttttcctgtaagcctagacagaagaattcccagtaacttccttgtgttgtgtacattcaactcacagagttgaacgttcccttagacagagcagatttcaaacactctttttgtgcaattggcaagtggagatttcaagcgctttaaggtcaatggcagaaaaggaaatatcttcgtttcaaaactagacagaattattcccacaaactgcgttgtgatgtgttcgttcaactcacagagtttaacctttcttttcatagagcagttaggaaacactctgtttgtaaattctgtaagtggatattctgacatcttgtggccttcgttggaaacgggatttcttcatattctgctagacagaagaattctcagaatcttccttgtgttgtgtgtattcaactcacagagttgaacgatcctttaaacagagcggacttgaaacactctttttgtggaatttgcaagtggagatttcagccgctttgaggtcaatggcagaaaaggaaatatcttcgaataaaaactagacagaatgattctcagaaactcctttgtgatgtgtgcgttcaactcacagagtttaacttttcttttcatagagcagttaggaaacactctgtttgtaaagtctgcaagtggatattcagacctcttgaggccttcgttggaaacgggatttcttcatattatgctagacagaataattctcagtaacttccttgtgttctctgtattcaactcacagagttgaacgatcctttacagagagcagacttgaaacactctttttgtggaatttgcaagtggagatttcagccgctttgaggtcaatggtagaaaaggcaatatcttcgtataaagactagacagaatgattctcataaactcctttgtgatgtgtgcgttcaactcacagagtttaacttttcttttcatagagcagttaggaaacactctgtttgtaaagtctgcaagtggatattcagacctctttgaggccttcgttggaaatgggatttcttcatattatgctagacagaagaattcccagtaacttccttgtgttgtgtgcattcaactcacagagttgaacgttcccttagacagagcagatttgaaacactctatttgtgcaatttgcaagtgtagatttcaagcgctttaaggtcaatggcagaaaaggaaatatcttcgtttcaaaactagacagaatcattcccacaaactgcgttgtgatgtgtttcttcaactcacagagtttaacctttctgttcatagagcagttaggaaacgctctgtttgtaaagtctgtaagtggatattctgacatcttgtggccttcgttggaaacgggatttcttcctattctgctagacagaagaaatctcagtaacttccttgtgttgtgtgtattcaactcacagagttgaacgatcctttacacagagcagatttgaaacaatgtttttgtggaatttgcaagtggagatttcagccgctttgaggtcaatggcagaaaaggaaatatcttcttatagaaactagacagaatgattctcagaaactcctttgtgatgtgtgtgttcaactcacagagtttaacctttcttttcatagagcagttagtaaacactctgtttataaagtctgcaagtggatattcagaccccttgaggccttcgttggaaacgggatttcttcatattatgctagacagaagaattctcagtaacttccttgtgttgtgtgtattcaactgacagagttgaactttcatttagagagagcagatttgaaacactgtttttgtggaatttgcaagtggagatttcaagcgctttggggccaaaggcagaaaaggaaatatcttcgtttaaaaactagacagaatcattctcagaaactgctgcgtgatgtgtgcgttcaactctcagagtttaacttttcttttcattcagcggtttggaaacactctgtttgtaaagtctgcacgtggaaattttgaccacttagaggccttcgttggaaacgggtttttttcatgtaaggcaagacagaagaattcccaggaacttccttgtgttgtgtacattcaactcacagagttgaacgttcccttagacagagcagatttgaaacaccctttttgtgcaattggcaagtggtgatttcagccgctttgaggtcaatggtagaaaaggaaatatcttcgtataaaaactagacagaatcattcccacaaactgcgttgtgatgtgttcgttcaactcacagagtttaacctttctgttcacagagcagttaggaaacactctgtttgtaaagtctgtaagtggatattctgacatcttgtggccttcgttggaaacgggatttcttcatattctgctagacagagaagattctcagaaacttccttgtgttgtgtgttttcaactcacagagttgaacgatgctttacacagagtagacttgaaacactctttttgtgtaatttgcaagtggagatttcagccgctttgaagtcaatggtagaaaaggaaatatcttcgtataaaaactagacagatgattctcagaaactcctttgtgatgtgtgcgttcaactcacagagtttaacctttcttttcatagagcagttaggaaacactctgtttgtaaagtctgcaagtggatattcagacctccttgaggccttcgttggaaacgggatttcttcatattctgctagacagaagaattctcagtaacttccttgtgttgtgtgtgttcaactcacagagttgaactttcatttacacagagcagatttgaaacactctttttgtggaatttgcaaatggagatttcaagcgctttgaggccaaaggcagaaaaggaaatctcttcgtataaaaactagacagaatcattctcagaaactgctgcgtgatgtgtgcgttcaactctcagagtttaacttttgttttcattcagcggtttggaaacactctgtttgtaaagtctgcacgtggatattttgaccacttagaggccttcgttggaaacgggtttttttcatgtaaggctagacagaagaattcccagtaacttccttgtgttgtgtgcattcaactcacagagttgaacgttcccttagacagagcagatttgaaacactctatttgtgcaatttgcaagtgtagatttcaagcgctttaaggtcaatggcagaaaaggaaatatcttcgtttcaaaactagacagaatcattcccacaaactgcgttgtgatgtgttcgttcaactcacagagtttaacctttcttttcatagaccagttaggaaacagtctgtttgtcaattctgtaagtggatattctgacatcttgtggccttcgttggaaacgggatttcttcatattctgctagacagaagaattctcagaatcttccttgtgttgtgtgtattcaactcacacagttgaacgattgtttacacagagcagatttgaaacactctttttgtggaatttgcaagtggagatttcagccgcattgaggtcaatggtagaaaaggaaatatcttcgtataaaaactagacagaatgattctcagaaactcctttgtgatgtgtgcgttcaactcatagagtttaacctttcttttcatagagcagttaggaaacactctgtttgtaaagtctgcaagtggatattcagacctctttgaggccttcgttggaaacgggatttcttcatattctgttagacagaagaattctcagtaacttccttgtgttgtgtgtattcaactcacagagttgaacgatcctttacacagagcagacttgaaacactctttttgtggaatttgcaagtggagatttcagccgctttgaggtcaatagtagaaaaggaaaactatcttcatataaagactagacagaatcattctcagaaactgctctgtgatgtgtgcgttcagctctcagagtttaacttttcttttcattcagcagtttggaaacactctgtttgtaaagtctgcacgtggatattttgaccacttagaggccttcgttggaaacgggtttttttcctgtaaggctagacagaagaattctcagtaacttccttgtgttgtgtgtattcaactcacagagttgaatgatcctttacacagagcagacttgaaacactctttttgtggaatttgcaagtggagatttcagccgctttaagttcaatggtagaataggaaatatcttcctatagaaactagacagaatgattctcagaaactcctttgtgatgtgtgcgttcaactcacagagttcaacctttcttttcatagagcagttgggaaacactctgtttgtaaagtctgcaagtggatattcagacttctttgagaccttcgttggaagcgggatttttacatattctgctacacagaagaattctcagtaacttccttgttttgtgtgtattcaactcacagagttgaacgatcctttacacagagcagacttgaaacactctttttgtggaatttgcaagtggagatttcagccgctttgaggtcaatggtagaataagaaatatcttcctatagaaactagacagagtgattctcagaaactcctttgtgatgtctgcgtttaactcacagagtttaacctttcttttcatagagcagttaggaaacactctgtttgtaaagtgtgcaagtggatattcagacctccttgaggccttcgttggaaacgggatttcttcatattatgctagacagaagaattcccagtaacttcgttgtgttgtgtacattcaactcacagagttgaacgttcccttagagagagcagatttgaaatactctttttgtgcaattggcaagtggagatttcaagcgctttaaggtcaatggcagaaaaggaaatatcttcgtttcaaaactagacagaatcattctcagaaactgctgcgtgatgtgtgcgttcaactctcagagtttaacttttcttttcattcagcggtttggaaacactctgtttgtaaagtctgcacgtggatattttgaccacttagaggccttcgttggaaacgggtttttttcatgtaaggctagacagaagaattcccagtaacttccttgtgttgtgtgcattcaactcacagagttgaacgttcccttagacagagcagatttgaaacactccatttgtgcaatttgcaagtgtagatttcaagcgctttaaggtcaatggcagaaaaggaaatatcttcgtttcaatactagacagaatgattctcagaaactcctttgtgatgtgtgcattcaactcacagagtttaacctttcttttcacagagcagttaggaaacacactgtttgtaaagtctgcaagtggatattcagacctccttgaggccttcgttggaaacgggatttcatcatattatgctagacagaagaattctcagtaacttccttgtgttgtgtgtattcaactcacagagttgaacgatcctttacacagagcagacttgaaacactctttttgtggaatttgcaagtggagatttcagccgctttgaggtcaatggtagaataggaaatatctttctatagaaactagacagaatgattctcagaaaatcctttgtgatgtgtgcgttcaactcacagagtttaacctttcttttcatagagcagttaggaaacactctgtttgtaaagtctgcaagtggatattcagacccccttgaggccttcgttggaaacgggatttctacatattatgctagacagaagaattctcagtaacttccttgtgttgtgtgtattcaactcacagagttgaacgatcctttacacagagcagacttgaaacactctttttgtggaatttgcaagtggagatttcagccgctttgaggtcaatggtagaataggaaatatcttcctatagaatctagacacaacgattctcagaaactcctttgtgatgtgtgcgttcaactcacagagtttaacctttcttttcatagagcagttaggaaacactctgtttgtaaagtctgcaagtggatattcagacctctttgaggccttcgttggaaacgggtttttttcatataaggctagacagaagaattcccagtaacttccttgtgttgtgtgcattcaactcacagagttgaacgttcccttagacagagcagatttgaaacactctatttgtgcaatttgcaagtgtagatttcaagcgctttaaggtcaatggcagaaaaggaaatatcttcgtttcaaaactagacagaatcattcccacaaactgcgttgtgatgtgctcgttcaactcacagagtttaacatttctgttcatagagcagttaggaaacactctgtttgtaaagtctgtaagtggatattcagacatcttgtggccttcgttggaaacgggatttcttcctattctgctagacagaagaattctcagtaacttccttgtgttgtgtgtattcaactcacagagttgaacgatcctttacagagagcagacttgaaacactctttttgtggaatttgcaagtggagatttcagccgctttgaggtcaatggtagaataggaaatatcttcctatagaaactagacagaatgattctcagaaacttctttgtgatgtgtgcgttgaactcacagagtttaacctttcttttcatagagcagttaggaaacactctgtttgtaaactctgcaagtggatattcagacctctttgaggccttcgttggaaacgggatttcttcatattatgcctgagagaagaattcccagtaacttccttgtgttgtgtgtgttcaactcacagagttgaactttcatttacacagagcagatttgaaacactctttttgtggaatttgcaaatggaggtttcaagccctttgaggccaaaggcagaaaaggaaatatcttcgtataaaaactagacagaatcattctcagagactgctctgtgatgtgtgcgttcaactctcagagtttaacttttcttttcattcagcagtttggaaacactctgtttgtaaagtctgcacgtggataatttgaccacttagagaccttcgttggaaacgggtttttttcatgtaaggctagacagaagagttctcagtaacttccttgtgttgtgtgtattcaactcacacagttgaacgatcctttacagagagcagacttgtaacactctttttgtggaatttgcaagtggagatttcagccgctttgaagtcaaagtagaaaaggaaatatcttcctatagaaactagacagaatcattcccacaaactgcgttgtgatgtgttcgttcaactcacagagtttaacctttcttttcatagagcagttaggaaacagtctgtttgtaaattctgtaagtggatactctgacatcatgtggccttcgttggaaacgggatttcttcatattctgctagacagaagaattctcagaatcttccttgtgttgtgtgtattcaactcacagagttgaacgatggtttacacagagcagatttgaaacactctttttgtggaatttgcaagtggagatttcagccgctttgaggtcaatggtagaaaaggaaatatcttcggtataaaaactagacagaatgattctcagaaactcctttgtgatgtgtgcgttcaactcacagagattaacttttcttttcatagagcagttaggaaacactctgtttgtaaagtctgcaagtggatattcagacctctttgtggccttcgttggaaacgggatttcttcatattatgctacacagaagaattcaagtaacttccttgtgttgtgtgtgttcaactcacagagttgaactttgatttacacagagcagatttgaaacactctttttgtggaatttgcaagtggagatttcaagcgctttgaggccaaaggcagaaaaggaaataccttcgtataaaaactagacagaatcattctcagaaactgctgcgtgatgtgtgcgttcaactctcagagtttaacttttcttttcattcagcggtttggaaacactctgtttgtaaagtctgcacgtggatattttcaccacttagaggccttcgttggaaacgggttttttcatgtaaggctagacagaagaattcccagtaacttccttgtgttgtgtgcattcaactcacagagttgaacgttcccttagacagagcagatttgaaacactctatttgtgcaatttgcaagtgtagatttcaagcgctttaaggtcaacggcagaaaaggaaatatcttcgtttcaaaactagacagaatcattcccacaaactgcgttgtgatgtgttcgttcatctcacagagtttaacctttcttttcgtagagcagttaggaaacagtctgtttgtaaattctgtaagtggatattctgacatcttgtggccttcgttggaaacgggatttcttcatattctgctagacagaagaattctcagtaactttccttgtgttgtgtgtattcaactcacagagttgaacgatcctttacacagagcagacttgaaacactctttttgtggaatttgcaagtggagatttcagccgctttgaggtcaatggtagaaaaggaaatatcttcgtataaagactagacagaatgattctcataaactcctttgtgatgtgtatgttcaactcacagagtttaacttttctattcatagagtagttaggaaacactctgtttgtaaagtctgcaagtggatattttgacctctttgaggccttcgttggaaacgggtttttttcatgtaaggctagacagaagaattcccagtaacttccttgtgttgtgtgtgttcaactcacagagttgaactttcatttacacagagcagatttgaaacactctttttgtggaatttgcaagtggagatttcaagcgctttgaggccaaaggcagaaaaggaaatatcttcgtataaaaacttgacagaatcattctcagaaactgctgcgtgatgtgtgcgttccactctcagagtttaacttttcttttcattcagcggtttggaaacactctgtttgtaaagtctgcacgtggatattttgaccacttagaggccttcgttggaaacgggttttttttcatgtaaggctagacagaagaattcccagtaacttccttgtgttgtgtgcattcaactcacagagttgaacgttcccttagacagagcagatttgaaacactctatttgtgcaatttgcaagtgtagatttcaagcgctttaaggtcaacggcagaagaggaaatatcttcgtttcaaaactagacagaatcgttctcagaaactgctctgcgatgtgtgcgttcaactctcagagtttaacttttcttttcattcagcagtttggaaacactctgtttgtatagtctgcacgtggataatttgaccacttagaggccttcgttggaaacgggtttttttcatgtaaggctagacagaagaattctcagtaacttccttgtgttgtgtgtattcaactcacacagttgaacgatcctttacacatagcagacttgtaacactctttttgtggaatttgcaagtggagattccagccgctttgaagtcaaatgtagaaaaggaaatatcttcctataaaaactagacagaatgattctcagaaactcctttgtgatgtgtgcgttcaactcacagagtttaacctttcttttcatagagcagttaggaaacacgctgtttgtaaagtctgcaagtggatattcagacctgtttgaggccttcgttggaaacgggtttttttcatataaggctagacagaagaattctcagtaacttccttgtgtggtgtgtattcaactgacagagttgaactttcatttagagagagcagatttgaaacactgtttttgtggaatttgcaagtggagatttcaagcgctttggggccaaaggcagaaaaggaaatatcttcgtataaaaactagacagaaacattctcagaaactgatgcgtgatgtgtgcgttcaactctcagagtttaacttttcttttcattcagcggtttggaaacactctgtttgtaaagtctgcacgtggaaattttgaccacttagaggccttcgttggaaacgggtttttttcatgtaaggctagacagaagaattcccagtaacttccttgtgttgtgtacattcaactcacagagttgaacgttcccttagacagagcagatttgaaacactctttttgtgcaattggcaagtggtgatttcagccgctttgaggtcaatggtagaaaaggaaatatcttcgtataaaaactagacagaacgattcacagaaactcctttgtgatgtgtgcgttcaactcacagagtttaacctttcttttcatagagcagttaggaaacactctgtttgtaaagtctgcaagtggatattcagacctctttgaggccttcgttggaaacgggatttcttcatattctgctagacagaagaattctcagtaacttccttgtgttgtgtgtattcaactcacagagttgaacgatcctttacacagagcagacttgaaacactctttttggggaatttgcaagtggagatttcagccgctttgaggtcaatggtagaaaaggaaactatcttcatataaagactagacagaatgattctcagaaactcctttgtgatgtgtgcgttcaactcacagagtttaacctttctgttcatagagcagttaggaaacactctgtttgtaaagtctgcaagtggatattcagacctccttgaggccttcgttggaaacgggatttcttcatattctgctagacagaagaattcccagtaacttccttgtgttgtgtgtgttcaactcacagagttgaactttcatttacacagagcagatttgaaacactctttttgtggaatttgcaagtggagatttcaagcgctttgaggccaaaggcagaaaaggaaatatcttcgttccaaaactagacagaatcattctcagaaactgctctgcgatgtgtgccttcaactctcagagtttaacttttgttttcattcagcagtttggaaacactctgtttgtaaagtctgcacgtggatattttgaccacttagaggccttcgttggaaatgggtttttttcctgtaaggctagacagaagaattcccagtaacttccttgtgttgtgtacattcaactcacagagttgaacgttcccttagacagagcagatttgaaacactctttttgtgcaattggcaaatggagatttcaagcgctttaaggtcaatggcagaaaaggaaatatcttcgtttcaaaactagacagaatcattcccacagactgcgttgtgatgtgttcgttcaactcacagagtttaacctttcttttcatagagcagttaggaaacagtctgtttgtcaattctgtaagtggatattctgacatcttgtggccttcgttggaaacgggatttcttcatattctgctagacagaacaattctcagtaacttccttgtgttgtgtgtattcaactcacagagttgaacgatcctttacacagagcggacttgaaacactctttttgtggaatttgcaattggagatttcagccgcgttgaggtcaatggtagaaaaggaaatatcttcgtataaaaactagacagaatgattctcagaaactcctttgtgatgtgtgtgttcaactcacagagtttaacctttcttttcatagagcagttaggaaacactctgtttgtaaagtttgcaagtggatattcagacctctttgaggccttctttggaaacgggtttttttcatgtaaggctagacagaagaattctcattaacttccttgtgttgtgtttattcaactcacagagttgaatgatcctttacacagagcagacttgaaacactctttttgtggaatttgcaagtggagatttcagccgctttgaggtcaatagtagaaaaggaaatatcttcgtagaaaaactagacagaatcattctcagaaaccgctctgtgatgtgtgcgttcaactctcagagtttaacctttcttttcatagagcagttaggaaacactctgtttgtaaagtctgcacgtggatattttgaccacttagaggccttcgttggaaacgggtttttttcatgtaaggctagacagaagaattcccagtaacttccttgtgttgtgtacattcaactcacagagttgaacgttcccttagacagagcagacttgtaacactctttttgtggaatttgcaagtggagatttcagccgctttgaagtcaaaggtagaaaaggaaatatcttcatataaaaactagacagaatcattcccacaaactgcgttgtgatgtgttcgttcaactcacagagtttaacctttctgttcatagagcagttaggaaacactctgtttgtaaagtctgcaagtggatattcagacctcctagaggccttcgttggaaacgggatttctccatattctgctagacagaagaattctcagtaacttccttgtgttgtgtgtattcaactcacagagttgaacgatcctttacacagagcggacttgaaacactctttttgtgtaatttgcaagtggagatttcagccgcgttgaggtcaatggtagaaaagaaaatatcttcgtataaaaactagacagaatgattctcagaaactcctttgtgatgtgtgcgttcaactcacagagtttaacctttcttttcatagagcagttaggaaacacctctgtttgtaaagtctgcaagtggatattcagacctccttgaggccttcgttggaaacgggattttttcatattatgctagacagaagaattccctgtaacttccttgtgttgtgtgtgttcgactcacagagttgaactttcatttacacagagcagatttgaaacactctttttgtggaatttgcaagtggagatttcaagcgctttgaggccaaaggcagaaaaggaaatatcttcgtttcaaaactagacagaatcattctcagaaactgctctgcgatgtgtgcgttcaactctcagagtttaacttttcttttcattcagcagtttggaaacactctgtttgtaaagtctgcacgtggatattttcaccacttagaggccttcgttggaaacgggtttttttcctgtaaggctagacagaagaattcccagtaacttcattgtgttgtgtacattcaactcacagagttgaacgttcccttagacagagcagatttgaaacactctttttgtgcaattggcaagtggagatttcaagcgctttaaggtcaatggcagaaaaggaaatatgcttcgtttcaaaactagacagaatcattcccacaaactgcgttgtgatgtgttcgttcaactcacagagtttaacctttcttttcatagagcagttaggaaacagtctgtttgaaaattctgtaagtggatattctgacatcttgtggccttcgttggaaacgggaattcttcatattctgctagacagaagaattctcagtaacttccttgtgttgtgtgtattcaactcacggagttgaactatcctttacacagagcagacttgaaacactctttttgtggaatttgcaagtggagatttcagccgctttgtggtctatagtagaaaaggaaatatcttcgtagaaaaactagacagaatgattctcagaaactcctttgtgatgtgtgtgttcaactcacagagtttaacctttcttttcatagagcagttagtaaacactctgtttataaagtctgcaagtggatattgagacccctttgaggccttcgttggaaacgggatttcttcatattatgctagacagaagaattctcagtaacttcccttgtgttgtgtgtattcaactgacagagttgaactttcatttagagagagcagatttgaaacactgtttttgtggaatttgcaagtggagatttcaagcgctttggggccaaaggcagaaaaggaaatatcttcgtataaaaactaggcagaatcattctcagaaactgctctgcgatgtgtgcgttcaactctcagagtttaacttttcttttcattcagcagtttggaaacactctgtttgtaaagtctgcacgtggatattttggccacttagaggccttcgttggaaacgggtttttttcctgtaaggctagacagaagaattcccagtaacttccttccgttgtgtacattcaactcacagagttgaacgttcccttagacagagcagatttgaaacactctttttgtgcaattggcaagtggagatttcaagcgctttgaggtcaatggcagaaaaggaaatatcttcgtttcaaaactagacagaatcattcccacaaactgcgttgtgatgtgttcgttcaactcacagactttaacctttcttttcatagagcagttaggaaacagtctgtttgtaaataatgtaagtggatattctgacatcttgtggccttcgttggaaacgggatttcttcatattctgctagacagaagaattctcagtaacttccttgtgttgtgtgtattcaactcacagagttgaacgatcctttacagagagcagacttgaaacactctttttgtggaatttgcaagtggagatttcagccgctttgaggtcaatggtagaaaaggaaatatcttcgtataaagactagacagaatgattctcagaaactcctttgtgatgtgtgtgttcaactcacagagtttaacgtttcttttcatagagcagttagtaaacactctgtttataaagtctgcaagtggatattcagacctctttgaggtcttcgttggaaacgggatttcttcatattatgctagacagaagaattcccagtaacttccttgtgttgtgtgtgttcaactcacagagttgaactttcatttacacatagcagatttgaaacactctttttgtggaatttgcaagtggagatatcaaacgctttgaggccaaaggcagaaaaggaaatatcttcgcataaaaactagacagaatcattctcagaaactgctctgcgatgtgtgcgttcaactctcagagtttaacttttcttttcattcagcagtttggaaacactctgtttgtaaagtctgcacgtggataatttgaccacttagaggccttcgttggaaacgggtttttttcatgtaaggctagacagaagaattctcagtaacttccttgtgttgtgtgtattcaactcacagagttgaacgatcctttacacacagcagacttgtaacactctttttgtggaattcgcaagtggagatttcagccgctttgaagtcaaaggtagaaaaggaaatatcttcctataaaaactagacagaatcattcccacaaactgccttgtgatgtgttcgttcaactcacagagtttaacctttctgttcatagagcagttaggaaacactctgtttgtaaagtctgtaagtggatattctgacatcttgtggccttcgttggaaacgggatttcttcatattctgctagacagaagaattctcagtaacttctttgtgttgtgtgtattcaactcacagagttgagcgatcctttacacagagcagacttgaaacactcgttttgtggaatttgcaagtggagatttcagccgctttaaggtcaatggtagaaaaggaaatatcttcgtataaaaactagacagaatgattctcagaaaatcatttgtgatgtgtgcgttcaactcacagagtttaacttttcttctcatagagcagttaggaaacactgtttgtaaagtctgcaagtggatattcagacctctttgaggccttcgttggaaacgggatttcttcatattctgctagacagaagaattctcagtaacttccttgtgttgtgtgtattcaactcacagagttgaacgatcctttacacagagcagacttgaaacactctttttgtggaatttgcaagaggagatttcagccgctttgaggtcaatggtagaataggaaatatcttcatatagaaactagacagaatcattctcagaaactgctgtgtgatgtgtgcgttcaactctcagagtttaacttttcttttcattcagcggtttggaaacactctgtttgtaaagtctgcacgtggatattttgaccacttagaggccttcgttggaaacgggattttttcatgtaaggctagacagaagatttcccagtaacttccttgtgttgtgtacattcaactcacagagttgaacgttcccttagacagagcagatttgaaacactctttttgtgcaattggcaagtggagatttcaagcactttaaggtcaatggcagaaaaggaaatatcttcgtttcaaaactagacagaatcattcccacaaactgcgttgtgatgtgttcgttcaactcacagagtttaacctttctgttcatagagcagttaggaaacactctgtttgtaaagtctgtaagtggatattctgacatcttgtggccttcgttggaaacgggatttcttcatattctgctagacagaagaattctcagtaacttccttgtgttgtgtgtattcaactcacagagttgaacgatcctttacacagagcagacttgaaacactctttttgtggaatttgcaagtggagatttaagccgctttgaggtcaatagtagaaaggaaatatcttcgtagaaaaactagacagaacgattctcagaaactcctttgtgatgtgtgcgttcaactcacagagtttaacctttcttttcatagagcagttaggaaacactctgtttgtaaagtctgcaagtggatattcagacctctttgaggccttcgttggaaacgggatttcttcatattctgctagacagaagaattctcagtaacttccttgtgttgtgtgtattcaactcacagagttgaacgatcctttacacagagcagacttgaaacactctttttgtggaatttgcaagtggagatttcagccgctttgaggtcaatagtagaaaaggaaatatcttcgtagaaaaagtagacagaatcattctcagaaaatcctctgtgatgtgtgcgttcaactctcagagtttaacttttcttttcattcagcagtttggaaacactctgtttgtaaagtctgcacgtggatattttgaccacttagaggccttcgttggaaacgggtttttttcatgtaagggtagacagaagaattcccagtaacttccttgtgttgtgtgcattcaactcacagagttgaactttcctttagacagagcagatttgaaacactctatttgtgcaatttgcaagtgtagatttcaagcgctttaaggtcaatggcagaaaaggaaatatcttcgtttcaaaactagacagaatgatactcagaaactcctttgtgatgtgggcgttcaactcacagagtttaacctttcttttcataggagcagttaggaaacactctgtttgtaaagtctgcaagtggatattcagacctctttgaggccttcgttggaaacgggatttcttcatattatgctagacagaagatttctcagtaactttccttgtgttgtgtgtattcaactcacagagttgaacgatcctttacacagagcagacttgaaacactctttttgtggaatttgcaagtggagatttcagccgctttgagttcaatggtagaataggaaatatcttccaatagaaactagacagaatgattctcagaaactcctttgtgatgtgtgcgttcaactcacagagtttaacctttcttttcatagagcagttaggaaacactctgtttgtaaagtctgcaagtggatatacagacctctttgaggccttcgttggaaacgggatttcttcatattctgctagagagaagaattcccagtaacttccttgtgttgtgtgtgttcaactcacagagttgaactttcatttacacagagcagatttgaaacactctttttgtggaatttgcaagtggagatttcaagcgctttgaggccaaaggcagaaaaggaaatatcttcggtataaaaactagacagaatcattctcagaaactgctgcgtgatgtgtgcgttcaactgtcagagtttaacttttcttttcattcagcggtttggaaacactctgtttgtaaagtctgcacgtggatattttgaccacttagaggccttcgttggaaacgggtttttttcatgtaaggctagacagaagaattctcagtagcttccttgtgttgtgtgcattcaactcacagagttgaacgttcccttagacagagcagatttgaaacagcctatttgtgcaatttgcaagtgtagatttcaagcgctttaaggtcaacggcagaaaaggaaatatcttcctttcaaaactagacagaatcattcccacaaactgggttgtgatgtgttcgttcaactcacagagtttaacctttctgttcatagagcagttaggaaacactctgtttgtaaagtctgtaagtggatattctgacatcttgtggccttcgttggaaacgggatttcttcatattctgctagacagaagaattctcagtaacttccttgtgttgtgtgtattcaactcacagagttgaacgatcctttacacagagcagtcttgaaacactctttttgtgtaatttgcaagtggagatttcagccgctttgaggtcaatagtagaaaaggaaatatcttcgtagaaaaactagacagaatgattctcagaaactcctttgtgatgtgtgcgttcaactcagagtttaacctttcttttcatagagcagttaggaaacactctgtttgtaaagtctgcaagtggatattcagacctctttgaggccttcgttggaaacgggtttttttcatataaggctagacagaagaattcccagtaacttccttgtgttgtgtgtgttcaactcacagagttgaactttcatttacacagagcagatttgaaacactctttttgtggaatttgcaagtggagatttcaagcgctttgaggccaaaggcagaaaaggaaatatcttcgtttcaaaactagagagaatcattctcagaaactgctctgcgatgtgtgcgttcaactctcagagtttaactttgcttttcattcagcagtttggaaacactctgttagtaaagtctgcacgtggataatttgaccacttagaggccttcgttggaaacgggtttttttcatgtaaggctagacagaagaattcccagtaacttccttgtgttgtgtacattcaactcacagagttgaacgttcccttagacagagcagatttgaaacactctttttgtgcaattggcaaatggagatttcaagcgctttaaggtcaatggcagaaaaggaaatatcttcgtttcaaaactagacagaatcattcccacaaactgcgttgtgatgtgttcgttcatctcacagagtttaacctttcttttcgtagagcagttaggaaacagtctgtttgtaaattctgtaagtggatatcctgacatcttgtggccttcgttggaaacgggatttcttcatattctgctagacagaagaattctcagaatcttccttgtgttgtgtgtattcaactcacacagttgaacgattgtttacacagagcagatttgaaacactctttttgtggaatttgcaagtggagatttcagccgctttgaggtcaatggtagaaaaggaaatatcttcgtataaaaactagacagaatgattctcagaaactcctttgtgatgtgtgtgttcaactcacagattttaacctttcttttcctagagcagttagtaaacactctgtttataaagtctgcaagtggatattcagacccctttgaggccttcgttggaaacgggatttcttcatattatgctagacagagaattcccagtaacttccttgtgttgtgtgtgttcaactcacagagttgaactttcatttacacagaacagatttgaaacactctttttgtggaatttgcaagtggagatttcaagcgctttgaggccaaaggcagaaaaggaaatatcttcgtttcaaaactagacagaatcattctcagaaactgctctgcgatgtgtgcgttcaactctcaaagtttaacttttcttttcattcagcagtttggaaacactctgtttgtaaagtctgcacgtggataacttgaccacttagaggccttcgttggaaacgggtttttttcatttaaggctagacagaagaattcccagtaacttccttgtgttgtgtacattcaactcacagagttgaacgttcccttagacagagcagatttgaaacactctttttgtgcaattggcaagtggagatttcaagcgctttaaggtcaatggcagaaaaggaaatatcttcgtttcaaaactagacggaatcattcccacaaactgcgttgtgatgtgttcgttcatctcacagagtttaacctttcttttcatagagcagttaggaaacactctgtttgtaaattctgtaagtggatattctgacatcttgtggccttcgttggaaacgggatttcttcatattctgctagacagagaagattctcagtaacttccttgtgttgtgtgtattcaactcacagagttgaacgatcctttacacagagcagacttgaaacattctttttgtcgaatttgcaagtggagatttcagccgctttgaggtcaatggtagaataggaaatatcttcctatagaaactagacagacgattctcagaaactcctttgtgatgtgtgcgttcaactcacagagtttaacctttcttttcatagagcagttaggaaacactctgtttgtaaagtctgcaagtggatattcagacctctttgaggccttcgttggaaacgggatttcttcctattctgctagacagaagaattctcagtaacttccttgtgttgtgtgtattcaactcacagagttgaaggatcctttacactgagcagacttgaaacactctttttgtggaatttgcaagtggagatttcagccgctttgaggtcaatggtagaaaaggaaactatcttcatataaagactagacagaatcattctcagaaactgctctgcgatgtgtgcgttcaactctcagagtttaacttttcttttcattcagcagtttggaaacactctgtttgtaaagtctgcacgtggatattttgaccactcagaggccttcgttggaaacgggtttttttcctgtaaggctagacagaagaattcccagtaacttccttgtgttgtgtgcattcaactcacagagttgaacgttcccttagacagagcagatttgaaacactctatttgtgcaatttgcaagtgtagttttcaagctctttaaggtcaacggcagaaaaggaaatatcttcgtttcaaaactagacagaatcattcccacaaactgcgttgtgatgtgttcgttcaactcacagagtttaacctttctgttcatagagcagttaggaaacactctgtttgtaaagtctgtaagtggatattctgacatattgtggccttcgttggaaacgggatttcttcatattctgggcctagacagaagaattgtcagtaacttccttgtgttgtgtgtattcaactcacagagttgaacgatcctttacacagagcagacttgaaacactctttttgtggaatttgcaagtgtagttttcagccgctttgaggtcaatggtagaataggaaatatcttcctatagaaactagacagaatgattctcagaaactcctttgtgatgtgtgcgttcaactcacagagtttaacctttcttttcatagagcagttaggaaacactctgcttgtaaagtctgcaagtggatattcagccctctttgaggccttcgttggaaacgggtttttttcatataaggctagacagaagaattcccagtaacttcccttgtgttgtgtgtattcaactcacagagttgaactttcatttacacagagcagatttgaaacactctttttgtggaatttgcaagtggagatttcaagcgctttaaggccaaaggcagaaaaggaaatatcttcgtataaaaactagacagaatcattctcagaaactgctctgcgatgtgtgcgttcaactctcagagtttaacttttcttttcattcagaagtttggaaacactctgtttgtaaagtctgcacgtggataacttgaccacttagaggccttcgttggaaacgggtttttttcatgtaaggctagacagaagaattcccagtaacttgccttgtgttgtgtacattcaactcacagagttgaacgttcccttagacagagcagatttgaaacactctttttgtgcaattggcaaatggagatttcaagcgctttaaggtcaatggcagaaaaggaaattgttcgtttcaaaactagacagaatgattctcagaaacttctttgtgatgtgtgcgttcaactcacagagtttaacctttcttttcatagagcagttaggaaacactctgtttgtaaactctgcaagtggatattaagacctctttgaggtcttcgttggaaacgggatttcttcatactgtgctagacagaagaattctcagtaacttccttgtgttgtgtgtattcaactcacagagttgaacgatcctttacacagagcggacttgaaacactctttttgtggaatttgcaagtggagatttcagccgcgttgaggtcaatggtagaaaaggaaatctcttcgtataaaaactagacagaatgattctcagaaactcctttgtgatgtgtgcgttcaactcacagagtttaacctttctgttcatagagcagttaggaaacactctgtttgtaaagtctgcaagtggatattcagacctccttgaggccttcgttggaaacgggatttcttcatcttctgctagacagaagaattctcagtaacttcccttgtgttgtgtgtattcaactgacagagttgaactttcatttagagagagcagatttcaaacactgtttttgtggaatttgcaagtggagatttcaagcgctttggggtcaaaggcagaaaaggaaatatcttcgtataaaaactagacagaatcattctcagaaactgctctgtgatatgtccgttcaactctcagagtttaacttttcttttcattcagcagtttggaaacactctgtttgtaaagtctgcacgtggataatttgaccacttagaggccttcgttggaaatgggtttttttcatgtaaggctagacagaagaattcccagtaacttccttgtgttgtgtacattcaactcacagagttgaacgttcccttagacagagcagatttgaaacactctttttgtgcaattggcaagtggagatttcaagcgctttaaggtcaatggcagaaaaggaaatatcttcgtttcaaaactagacagaatgattctcagaaagtcctttgtgatgtgtgcgttcaactcacagagtttaccctttctgttcatagagcagttaggaaacactctgtttgtaaattctgcaagtggatattcagacctacttgaggtcttcggtggaaacgggacttcttcatattctgttagacagaagaattctcagtaacttccttgtgttgtgtgtattcaactcacagagttgaacgatcctttacacagagcagacttgaaacactctttttgtggaatttgcaagtggagatttcatccgctttgaggtcaatggtagaaaaggagactatcttcatataaagactagacagaatgattctcagaaactcctttgtgatgtgtgcgttcaactcacagagttgaacctttcttttcatagagcagttgggaaacactctgtttgtaaagtctgcaagtggatattcagacttctttgaggccttcgttggaagcgggatttcttcatattctgctagacagaagaattctcagaaacttccttgtgttgtgtgtattcaactgacagagttgaactttcatttagagagagcagatttgcaacactgtttttgtggaatttgcaagtggagatttcaagcgctttggggccaaaggcagaaaaggaaatatcttcggataaaaactagacagagaatcattctcagaaactgctctgcgatgtgtgcgttcaactctcagagtttaacttttcttttcattcagcagtttggaaacactctgtttgtaaagtctgcacgtggatattttgaccacttagaggccttcgttggaaacgggtttttttcctgtaaggctagacagtagaattcccagtaacttccttgtgttgtgtacattcaactcacagagttgaacgttcccttagacagagcagatttgaaacacactttttgtgcaattggcaagtggagatttcaagcgctttaaggtcaatggcagaaaaggaaatatcttcgtttcaaaactagacagaatcattcccacaaactgcgttgtgatgtgttcgttcatctcacagagtttaacctttcttttcatagtgcagttaggaaacactctgtttgtaaattctgtaagtggatattctgacatcttgtggccttcgttggaaacgggaattcttcatattctgctagacagaataattctcagtaacttccttgtgttgtgtgtattcaactcagagagttgaacgatcctttacagagagctgacttgaaacactctttttgtggaatttgcaagtggtgatctcagccgctttgaggtcaatggtagaataggaaatatcttcctatagaaagtagacagaatgattctcagaaactcctttgtgatgtgtgcgttcaactcacagagtttaacctttcttttcatagagcagttaggaaacactctgtttgtaaagtctgcaagtggatattcagacctccttgaggccttcgttggaaacgggtttttttcatataaggctagacagaagaattcccagtaacttccttgtgttgtgtgtgttcaactcacagagttgaactttcatttacacagagcagatttgaaacactctttttgtggaatttgcaagtggagatttcaagcgctttgaggccaaaggcagaaaaggaaatatcttcgtttcaaagctagacagaatcattctcagaaactgctgcatgatgtgtgcgttcaactgtcagagtttaacttttcttttcattcagcggtttggaaacactctgtttgtaaagtctgcacgtggatattttgaccacttagaagccttcgttggaaaagggtttttttcatgtaaggctagacagaagaattcccagtaacttccttgtgttgtgtgcattcaactcacagagttgaacgttcccttagacagagcagatttgaaacactctatttgtgcaatttgcaagtgtagatttcaagcgctttaaggtcaatggcagaaaaggaaatatcttcgtttcaaaactagacagaatcattcccacaaactgcgttgtgatgtgttcgttcaactcacagagtttaacctttctgttcatagagcagttaggaaacactctgtttgtaaagtctgaaagtggatattctgacatcttgtggccttcgttgggaacgggatttcttcatattctgctagacagaagaattctcagaatcttccttgtgttgtgtgtattcaactcacagagttgaacgatggtttacacagagcagatttgaaacactctttttgtggaatttgcaagtggagatttcagccgctttgaggtcaatggtagaaaatgaaatatcttcgtataaaaactagacagaatgattctgagaaactcctttgtgatgtgtgcgttcaactcacacagtttaacctttcttttcatagagcagttaggaaacactctgtttgtaaagtctgcaagtggatattcagacctccttgaggccttcgttggaaacgggatttcttcatattatgctagacagaagaattctcagtaacttccttgtgttgtgtgtattcaactgacagagttgaactatcatttagagagagcagatttgaaacactgtttttgtggaatttgcaagtggagatttcaagcgctttggtgccaaaggcagaaaaggaaatatcttcgtataaaaactagacagaatcattctcagaaactgctctccgatgtgtgcgttcaactctcagagtttaacttttcttttcattcagcagtttggaaacactctgtttgtaaagtctgcacgtggataatttgaccacttagaggccttcgttggaaacgggttttttttcatgtaaggctagacagaagaattcccagtaacttccttgtgttgtgtgcattcaactcacagagttgaacgttcccttagacagagcagatttgaaacactctatttgtgcaattggcaagtgtagatttcaagcgctttaaggtcaatggcagaaaaggaaatatcttcgtttcaaaactagacagaatcattcccacaaactgcgttgtgatgtgttcgttcaactcacagagtttaacctttctgttcatagagcagttaggaaacactctgtttgtaaagtctgtaagtggatattctgacatcttgtggccttcgttggaaacgggatttcttcatattctgctagacagaagaattctcagaaacttccttgtgttgtgtgtattgaactcacagagttgaacgatcgtttacacagagcagacttgagacactctgtttgtgtaatttgtaagtggagatttcagccgctatgaggtcaatggtagaaaaggaaatatcttcatataaaaactagacagaatgattctcagaaactcctttgtgatgtgtgcgttcaactcacagagtttaacctttcttttcatagagcagttagtaaacactctgtttgtaaagtctgcaagtggatattcagacccctttgaggccttctttggaaacgggatttcttcatattctgctagacagaagaattctcagtaacttccttgtgttgtgtgcattcaactgacagagttgaactttcatttagagagagcagatttgaaacactgtttttgtggaatttgcaagtggagatttcaagcgctttggggccaaaggcagaaaaggaaatatcttcgtataaaaactagacagaatgattctcagaaactcctttgtgatgtgtgcgttcaactcacagagtttaacctttcttttcatagagcagttaggaaacactctccttgtaaagtctgcaagtggatattttgaccacttagaggccttcgttggaaacgggtttttttcatataaggctagacagaagaattcccagtaacttccttgtgttgtgtacattcaactcacagagttgaacgttcccttagacagagcagatttgaaacactatttttgtgcaattggcaagtggagatttcaagcgctttgaggtcaatggcagaaaaggaaatatcttcgtttcaaaactagacagaatcattcccacaaaactgcgttgtgatgtgttcgttcaactcacagagtttaacctttctgttcatagagcagttaggaaacactctgtttgtaaagtctgtaagtggatattctgacatcttgtggccttcgttggaaacgggatttcttcatattctgctagacagaagaattctcagtaacttccttgtgttgtgtgtattcaactcacagagttgaatgatcctttacacagaacagtcttgaaacactctttttgtggaatttgcaagtggagatttcatccgctttgaggtcaatggtagaatagggaatatcttcctatagaaactagacagaatgattctcagaaactcctttgtgatgtgtgcgttcaactcacagagtttaacctttcttttcatagagcagttaggaaacactctgtttgtaaagtctgcaagtggatattcagacatctttgaggctttcgttggaaacgggatttcttcatattctgctaggcagaagaattctcagaaacttcgatgtgttgtgtgttttcaactcacagagttcaacgatcatttacacagagtagacttgaaacactctttttgtggaattggcagggtggagatttcagccgctttgaggtcaaaggtagaaaaggaaatatcttcgtataaaaactagacagaatgattctaagaaactcctttgtgatgtgtgcgttcaactcacagagtttaacctttcttttcatagagcagttgggaaacactctgtttgtaaagtctgcaagtggatattcagacatccttgaggctttcgttggaaacgggatttcttcatattctgctagaaagaagaattctcagtaacttccttgtgttgtgtgtatgcaactcacagagttgaatgatcctttacacagagcagacttgaaacactctttttgtggaatttgcaagtggagatttcagccgctttgaggtcaatggtagaaaagtaaatatcttcgtataaagactagacagaatgattctcagaaactcctttgtgatgtgtgcgttcaactcacagagtttaacctttctgttcatagagcagttaggaaacactctgtttgtatagtctgcaagtggatattcagacctccttgaggccttcgttggaaacgggatttcttcaatattctgctagacagaagaattctcagtaacttccttgtgttgtgtgtattcaactcacagagttgaacgatcctttacacagagcagacttgaaacactctttttgtggaatttgcaagtggagatttcagccgctttcaggtcaatagtagaaaaggaaatatcttcgtagaaaaactagacagaatgattctcagaaactcctttgtgatgtgtgcgttcaactcacagagtttaacttttcttttcatagagccgttaggaaacactctgtttgtaaagtctgcaagtggatattcagacctctttgaggccttcgttggaaacgggatttcttcatattatgctagacagaagaattctcagtaacttccttgtgttgtgtgtattgaactcacagagttgaacgatcctttacacagagcagacttgaaacattctttttgtggaatttgcaagtggagatttcagccgctttgaggtcaatggtagaataggaaatatcttcctatagaaactagacagaatcattctcagaaactgctgcgtgatgtgtgcgttcaactctcagagtttaacttttcttttcattcagcggtttggaaacactctcgtttgtaaagcctgcacgtggatattttgaccacttagaggccttcgttggaaacgggtttttttcatgtaaggctagacagaagaattctcagtaacttccttgtgttgtgtgtattcaactcacagagttgaacgatcctttacacagagcagacttgaaacactctttttgtggaatttgcaactgtagatttcaagcgctttaaggtcaatggcagaaaaggaaatatcttcgtttcaaaactagacagaatgattctcagaaactcctttgtgatgtgtgcgttcaactcacagagtttaacctttctgttcatacagcagttaggaaacactctgtttgtaaagtctgcaagtggatattcagacctccttgaggccttcgttggaaacgggatttcttcatattctgctagacagaagaattctcagaaacttccttgtgttgtgtgttttcaactcacagagttgaacgatcctttacacagagcagacttgaaacactccttttgtggaatttgcaagtggagatttcagccgctttgagttcaatggtagaataggaaatatcttcctatagaaactagacagaatgattctcagaaactcctttgtgatgtgtgcgttcaactcacagagtttaacctttcttttcatagagcagttaggaaacactctgtttgtaaagtctgcaagtggatattcagacatccttgaggctttcgttggaaacgggatttcttcatattctgctagaaagaagaattctcagtaacttccttgtgttgtgtgtattcaactcacagagttgaacgatcctttacacagagcagacttgaaacactctttttgtggaatttgcaagtggagatttcagcctctttgaggtcaatggtagaataggaaatatcttcctatagaaagtagacagaatcattctcagaaactgctgcgtgatgtgtgcgttcaactctcagagtttaacttttcttttcattcagcggtttggaaacactctgtttgtaaagtctgcacgtggaaattttgaccacttagaggccttcgttggaaacgggtttttttcatgtaaggctagacagaagaattcccagtaacttccttgtgttgtgtacattcaactcacagagttgaacgttcccttagacagagcagatttgaaacactctttttgtgcaattggcaagtggagatttcaagcactttaaggtcaatggcagaaaaggaaatatcttcgtttcaaaactagacagaatcattcccacaaactgcgttgtgatgtgttcgttcaactcacagagtttaaactttcttttcatagagcagttaggaaacagtctgtttgtaaattctgtaagtggatattctgacatcttgtggccttcgttggaaacgggatttcttcatattttgctagacagaagaattctcagtaacttccttgtgttgtgtgtattcaactcacagagttgaatgatcctttacacagagcagacttgaaacactctttttgtggaatttgcaagtggagatttcagccgctttgaggtcaatggtagaaaaggaaactatcttcatataaagactagacagaatgattctcagaaactcctttgtgatgtgtgcgttcaactcacagagtttaacctttcttttcatagagcagttaggaaacactctctaaagtctgcaagtggatattcagacctccttgaggtcttcgttggaaacgggatttcttcatattctgccagacagaagaattctcagtaacttccttgtgttgtgtttattcaactcacagagttgaatgatcctttacagagagcagacttgaaacactctttttgtggaatttgcaagtggagatttcagccgctttgaggtcaatggtagaaaagtaaatatcttcctataaagactagacagaatgattctcagaaactcctttgtgatgtgggcgttcaactcacagtgtttaacctttcttttcatagagcagttgggaaacactctgtttgtaaagtctgcatgtggatatttggacttctttgaggctttcgttggaaacgggtttttttcatgtaaggctagacagaagaattcccagtaactttccttgtgttgtgtacgttcaactcacagagttgaacgttcccttagacagagcagatttgaaacactctttttgtgcaattggcaagtggagatttcaagcgctttaagttcaatggcagaaaaggaaatatcttcgtttcaaaactagacagaatcattcccacaaactgcgttgtgatgtgttcgttcatctcacagagtttaacctttcttttcatagagcagttaggaaacagtctgtttgtcaattctgtaagtggatattctgacatcttgtggccttcgttggaaacgggatttcttcatattctgctagacagaagaattctcagtaacttaccttgtgttgtgtgtattgaactcgcagagttgaacgatcctttacacagagcagacttgaaacactctttttgtggaatttgcaagtggagatttcagccgctttgaggtcaatagtagaaaaggaaatatcttcgtagaaaaactagacagaatgattctcagaaactcctttgtgatgtgtgtgttcaactcacgaagtttaacctttcttttcatagagcagttagtaaatactctgtttataaagtctgcaagtggatattcagacccctttgaggccttcgttggaaacgggatttcttcatattatgctagacagaagaattcccagtaacttccttgtgttgtgtgtgttcaactcacagagttgaactttcatttacacagagcagatttgaaaccctctttttgtggaatttgcaagtggagatttcaagggctttgaggccaaaggcagaaaaggaaatgtcttcgtttcaaaactagacagaatcattctcagaaactgctgcgtgatgtgtgcgttcaactctcagagtttaacttttcttttcattcagcggtttggaaacactctgtttgtaaagtctgcacgtggatattttgaccacttagaggccttcgttggaaacggaattttttcatgtaaggctagacagaagaattcccagtaacttccttgtgttgtgtacattcaactcacagagttgaacgttcctttagacagagcagatttgaaacactctttttgtgcaattggcaagtggagatttcaagcgctttaaggtcaatggcagaaaaggaaatatcttcgtttcaaaactagacagaatcattcccacaaactgcgttgtgatgtgttcgttcaactcacagagtttaacctttcttttcatagagcagttaggaaacagtctgtttgtaaattctgtaagtggatattctgacatcttgtggcattcgttggaaacgggatttcttcatattctgctagacagaagaattctcagtaacttccttgtgttgtgtgtattcaactcacagagttgcacgatcctttacacagagcagacttgaaacactctttttgtggaatttgcaagtggagatttcagccgctttgaggtcaatagtagaaaaggaaatatcttcgtagaaaaactacacagaatgattctcagaaaatcttttgtgatgtgtgcgttcaactcacagagtttaacttttcttctcatagagcagttaggaaacactctgtttgtaaagtctgcaagtggatattaagacctctttgaggccttcgttggaaacgggatttcttcatattatgctagacagaagaattctcagtaacttccttgtgttgtgtgtattcaactgacagagttgaactttcatttagagagagcagatttgaaacactgtttttgtggaatttgcaagtggagatttcaagcgctttcgggccaaaggcagaaaacgaaatatcttcgtataaaaactagacagaatcattcttagaaactgctgcgtgatgtgtgcgttcaactctcagagtttaacttttcttttcattcagcggtttggaaacactctgtttgtaatgtctgcacgtggatattttgaccacttagaggccttcgttggaaacgggttttttgcatgtaaggctagacagaagaattctcagtaacttccttgtgttgtgtgcattcaactcacagagttgaacgttcccttagacagagcagatttgaaacagcctatttttgcaatttgcaagtgtagatttcaagcgctttaaggtcaacggctgaaaaggaaatatcttcctttcaaaactagacagaatgattctcagaaactcctttgtgatgtgtgcgttcaactcacacagtttaacctttcttttcatagagcagttaggaaacactctgtttgtaaagtctgcaagtggatattcagacctccttgaggccttcattggaaacgggatttcttcatattatgctagacagaagaattctcagtaacttccttgtgttgtgtgtattcaactcacagagttgaacgatcctttacacagagcagacttgaaacactccttttgtggaatttgcaagtggagatttcagccgctttgaggtcaatggtagaataggaaatatcttcctatagaaagtagacagaatgattctcagaaactcctttgtgatgtgtgcgttcaactcacagagtttaacctttcttttcatagagcagttaggaaacactctgtttgtaaagtctgcaagtggatattcagacctctttgaggccttcgttggaaactgggtttttttcatataaggctagacagaagaattcccagtaacttccttgtgttgtgtgtgttcaactcacagagttgaactttcatttacacagagcagatttgaaacactctttttgtggaatttgcaagtggatatttcaagcgctttgaggccaaaggcagaaaaggaaatatcttcgtttcaaaactagacagaatcattctcagaaactgctgcgtgatgtgtgcgttcaactctcagagtttaacttttcttttcattcagcggtttggaaacactctgtttgtaaagtctgcacgtggaaattttgaccacttagaggccttcgttggaaacgggtttttttcatgtaaggatagacagaagaattcccagtaacttccttgtgttgtgtgcattcaactcacagagttgaacgttcccttagacagagcagatttgaaacactctatttgtgcaatttgcaagtgtagatttcaagcgctttaaggtcaacggcagaaaaggaaatatcttcgtttcaaaactagacagaatgattctcagaaactcctttgtgatgtgtgcgttcaactcacagagtttaacttttcttttcatagagcagttaggaaacactctgtttgtaaagtctgcaagtggatattcagacctctttgaactcttcgttggaaaagggatttcttcatattatgctagacagaatacttctcagtaacttccttgtgttgtgtgtattcaactcacagagttgaacgatcctttacagagagccgacttgaaacactctttttgtggaatttgcaagtggagatttcagccgctttgaggtcaatggtagaaaaggaaatattttcgtataaagactagacagaatgattctcagaaaatcctttgtgatgtgtgcgttcaactcacagagcttaacctttcttttcatagagcagttaggaaacactctgtttgtaaagtctgcaagtggatattcagacacctttgaggccttcgttggaaacgggatttcttcatgttctgctagacacaagaattctcagtaacttccttgtgttgtgtgtattcaactgacagagttgaacgatcctttacacagagcagacttgaaacactctttttgtggaatttgcaagtggagatttcaagcgcttcggggccaaaggcagaaaaggaaatatcttcgtataaaaactagacagaatcattctcagaaactgctgcgtgatgtgtgcgttcaactctcagagtttaacttttcttttcattcagcggtttggaaacactctgtttgtaaagtctgcacgtggaaattttgaccacttagaggccttcgttggaaacgggattttttcatgtaaggctagacagaagaattcccagtaacttccttgtgttgtgtacattcaactcacagagttgaacgttcccttagacagagcagatttgaaacactctttttgtgcaattggcaaatggagatttcaagcgctttaaggtcaatggcagaaaaggaaatatcttcgtttcaaaactagacagaatcattcccacaaactgcgttgtgatgtgttcgttcaactcacagagtttaacctttctgttcatagagcagttaggaaacactctgtttgtaaagtctgaaagtggatattctgacatcttgtggccttcgttggaaacgggatttcttcatattctgctagacagaagaattctcagtaacttccttgtgttgtgtgtattcaactcacagagttgaacgatcctttacacagagcagacttgaaacactctttttgtggaatttgcatgtggagatttcagccgctttgagttcaatggtagaatagaaaatatcttcctatagaaactagacagaatgattctcataaactcctttgtgatgtgtgcgttcaactcacagagtttaacctttcttttcatagagcagttaggaaacactctgtttgaaaagtctgcaagtggatattcagacctccttgaggccttcgttggaaacgggatttcttcatattctgctagacagaagaattctcagtaacttccttgtgttgtgtttattcaactcacagagttgaatgatcctttacacagagcagacttgaaacactctttttgtggaatttgcaagtggcgatttcagccgctttgaggtcaatgatagaaaagtaaatatcttcgtataaagactagacagaatcattctcagaaactgctctgcgatgtgtgcgttcaactctcagagtttaacttttcttttcattcagcagtttggaaacactctgtttgtaaagtctgcacgtggatattttgaccacttagaggccttcgttggaaacgggtttttttcctgtaaggctaaaaagaagaattcacagtaacttccttgtgttgtgtacattcaactcacagagttgaacgttcccttagacagagcagatttgaaacactctttttgtgcaattggcaagtggagatttcaagcgctttaaggtcaatggcagaaaaggaaatatcttcctttcaaaactagacagaatcattcccacaaactgcgttgtgatgtgttcgttcatctcacagagtttaacctttcttttcgtagagcagttaggaaacagtctgtttgtaaattctgtaagtggatattctgacatcttgtggccttcgttggaaacgggatttcttcatattctgctagacagaagaattctcagtaacttccttgtgttgtgtgtattcaactcacagagttgaacgatcctttacagagagcagactttaagcactctttttgtggaatttgcaagtggagatttcagccgctttgaggtcaatggtagaaaaggaaatatcttcgtataaagactagacagaatgattctcagaaactcctttgagatgtgtgtgttcaactcacagagtttaacctttcttttcatagagcagttaggaatcactctgtttgtaaagtctgcaagaggatattcagacctctttgaggcctttgttggaaacgggtttttttcatataaggctagacagaagaattctcagaaacttccttgtgttgtgtgtattcaactcacagagttgaacgatgctttacacagagtagacttgaaacactctttttctggaatttgcaagtggagatttcaggcgctttgaggtcaatggtagaaaaggaaatatcttcgtataaaaactagacagaatcattctcagaaactgctctgcgatgtgtgcgttcaactctcagagtttaacatttcttttcattcagcagtttggaaacactctgtttgtaaagtctgcacgtggataacttgaccacttagaggccttcgttggaaacgggtttttttcatgtaaggctagacagaagaattcccagtaacttccttgtgttgtgtgcattcaactcacagagttgaacgttcccttagacagagcaggatttgaaacactctatttgtgcaatttgcaagtgtagatttcaagcgctttaaggtcaatggcagaaaaggaaatatcttcgtttcaaaactagacagaatcattcccacaaactgcgttgtgatgtgttcgttcaactcacagactttaacctttctgttcatagagcagttaggaaacactctgtttgtaaagtctgcaagtggatattcagacctccttgaggccttcgttggaaacgggatttcttcatattctgctagacagaagaattctcagaaacttccttgtgttgtgtgttttcaactcacagagttgaacgatcctttacacagagcagacttgaaacactctttttgtggaatttgcaagtggagatttcagccgctttgaggtcaatggtaaaataggaaatatcttcctatagaaactagacagaatgattctcagaaacttctttgtgatgtgtgcgttcaactcacagagtttaacctttctgttcatagagcagttaggaaacactctgtttgtaaactctgcaagtggatattcagacctctttgaggccttcgttggaaacgggatttctccatactgtgctagacagaagaattcccagtaacttccttgtgttgtgtgtgttcgactcacagagttgaactttcatttacacagagcagatttgaaacactctttttgtggaatttgcaaatggagatttcaagcgctttgagtccaaaggcagaaaaggaaatatcttcgtataaaaactagacagaatcattctcagaaactgctctgcgatgtgtgcgttcaactctcagagtttaacttttcttttcattcagcagtttggaaacactctgtttgtaaagtctgcacgtggatattttgaccacttagaggccttcgttggaaacgggtttttttcctgtaaggctagacagaagaattcccagtaacttccttgtgttgtgtacattcaactcacagagttgaacgttcccttagacagagcagatttgaaacactctttttgtgcaattggcaagtggagatttcaagcgctttaaggtcaatggcagaaaaggaaatatcttcgtttcaaaactagacagaatcattcccacaaactgcgttgtgatgtgttcgttcaactcacagagtttaacctttcttttcatagagcagttaggaaacagtctgtttgtcaattctgtaagtggatattctgacatcttgtggccttcgatggaaacgggttttcttcatattctgctagacagaagaattctcagaaacttccttgtgttgtgtgtattcaactcacagagttgaacgatcgtttacacagagcagacttgagacactctttttgtggaatttgtaagtggagatttcagccgctttgaggtcaatggtagaaaaggaaatatcttcatataaaaactagacagaatgattctcagaaactcctttgtgatgtgtgtgttcaactcacagagtttaacctttctttccgtagagcagttaggaaacactctgtttgtaaagtctgcaagtggatattcagacctccttgaggccttcgttggaaatgggatttcttcatattctgctagacagaagaattcccagtaacttccttgtgttgtgtgtgttcaactcacagagttgaactttcatttacacagagcagatttgaaacactctttttgtggaatttgcaagtggagatttcaagcgctttgaggcgaaaggcagaaaaggaaatatcttcgtataaaaactagacagaatcattctcagaaactgctgcgtgacgtgtgccttcaactctcagagtttaacttttcttttcattcagcggtttggaaacactctgtttgtaaagtctgcacgtggatattttgaccacttagaggccttcgttggaaacgggattttttcatgtaaggctagacagaagaattcccagtaacttccttgtgttgtgtgcattcaactcacagagttgaacgttcccttagacagagcagatttgaaacactctatttgtgcaatttgcaagtgtagatttcaagcgctttaaggtcaatggcagaaaaggaaatatcttcgtttcaaaactagacagaatcattcccagaaactgcgttgtgatgtgttcgttcaactcacagagtttaacctttctgttcatagagcagttaggaaacactctgtttgtaaagtctgtaagtggatattctgacgtcttgtggccttcgttggaaacgggatttcttcatattctgctagacagaagaattctcagtaacttccttgtgttgtgtgtattcaactcacagagttgaacgatcatttacacaaagcagacttgaaacactctttatgtggaatttgcaagtggagatttcagccgctttgaggttaatggtagaaaatgaaatgtcttcgtatagaaactagacagaatgattctcagaaactcctttgtgatgtgtgcgttcaactcacagagtttaacctttcttttcatagagcagttaggaaacactctgtttgtaaagtctgcaagtggatattcagacctccttgaggccttcgttggaaacgggatttcttcctattatgctagacagaagaattcccagtaacttccttgtgttgtgtgtgttcaactcatagagttgaactttcatttacacagagcagatttgaaacactctttttgtggaatttgcaagtggagatttcaagcgctttgaggccaaaggcagaaaaggaaatatcttcgtataaaaactagacagaatcattctcagaaactgctgcgtgatgtgtgcgttcaactctcggagtttaacttttcttttcattcagcggtttggaaacactctgtttgtaaagtctgcacgtggatattttgaccacttagaggccttcgttggaaacgggtttttttcatgtaaggctagacagaagaattcccagtaacttccttgtgttgtgtgcattcaactcacagagttgaacgttcccttagacagagcagatttgaaacactctatttgtgcaatttgcaagtgtagatttcaagcgctttaaggtcaatggcagaaaaggaaatatcttcgtttcaaaactagacagaatgattctcagaaactcctttgtgatgtgtgcgttcaactcacagagtttaacttttcttttcatagagcagttaggaaactctctgtaaagtctgcaagtgcatattcagacctctttgaggccttcgttggaaacgggatttcttcatattatgctagacagaataattctcagtaacttccttatgttgtgtgtattcaactcacagagttgaacgatcctttacagagagcagacttgaaacactctttttgtggaattcgcaagtggagatttcagccgctttgaggtcaatggtagaaaaggatatatcttcgtataaagactagacagaatgattctcagaaactcctttgtgatgtgtgcgttcaactcacagagtttaacctttcttttcatagagcagttaggaaacactctgtttgtaaagtctgcaagttgatattcagacctctttgaggccttcgttggaaaggggatttcttcatattctgctagagagaagaattctcagtaacttcccttgtgttgtgtgtattcaactcacagagttgaacgatcctttacacagagaagacttgaaacactctttttgtggaatttgcaagtggagatttcagccgctttcaggtcaatagtagaaaaggaaatatcttcgtagaaaaactagacagaatcattctcagaaactgctctgcgatgtgtgcgttcaactctcagagtttaacttttcgtttcattcagcagtttggaaacactctgtttgtaaagtctgcacgtggatattttgaccacttagaggccttcgttggaaacgggtttttctcctgtaaggctagacagaagaattcccagtaacttccttgtgttgtgtacattcaactcacagagttgaacgttcccttagacagagcagatttgaaacactctttttgtgcatttggcaagtggagatttcaagcgctttgaggtcaatggcagaaaaggaaatatcttcgtttcaaaactagacagaatcattcccacaaactgcgttgtgatgtgttcgttcatctcacagagtttaacctttcttttcatagagcagttaggaaacactctgtttgtaaattctgtaagtggatattctgacatcttgtggccttcgttggaaacgggatttcttcatattctgctagacagaagaattctcagtaacttccttgtgttgtgtgtattcaactcacagagttgaacgatcctttacacagagcagacttgaaacactctttttctggaatttgcaagtggagatttcagccgctttgaggtcaatggtagaataggaaatatcttcttatagaaactagacagaatgattctcagaaacttcattgtgatgtgtgcgttcaactcacagagtttaacctttcttttcatagagcagttaggaaacactctgtttgtaaactctgcaagtggatattcagacctctttgaggccttcgttggaaaggggatttctccatactgtgctagacagaagaattcccagtaacttccttgtgttgtgtgtgttcaactcacagagttgaactttgatttacacagagcagatttgaaacactctttttgtggaatttgcaagtggagatttcaagcgctttgaggccaaaggcagaaaaggaaatatcttcgtataaaaactagacagaatcattctcagaagctgctctgcaatgtgtgcgttcaactctcagagtttaacttttcttttcattcagcagtttggaaacactctgtttgtaaagtctgcacgtggatattttgaccacttagaggccttcgttggaaacgggtttttttcctgtaaggctagacagaagaattcccagtaacttccttgtgttgtgtacattgaactcacagagttgaacgttcccttagacagagcagatttgaaacactctttttgtgcaattggcaagtggagatttcaagggctttaaggtcaatggcagaaaaggaaatatcttcgtttcaaaactagacagaatcattcccacaaactgcgttgtgatgtgttcgttcaactcacagagtttaacctttcttttcatagagcagttaggaaacagtctgtttgtaaattctgtaagtggatattctgacatcttgtggccttcgttggaaacgggatttcttcatattctgctagacagaagaattctcagtaacttccttgtggagttgtgtgtattcaactcacagagttgaacgatcctttacacagagcagacttgaaacattctttttctggaatttgcaagtggagatttcagccgctttgaggtcaatggtagaataggaaatatcttcctatagaaactagacagaatgattctcataaactcctttgtgatgtgtgcgttcaactcacagagtttaacctttcttttcatagagcagttaggaaacactctgtttgtaaagtctgcaagtggatattcagacctccttgaggccttcgttggaaacgggatttcttcatattctgctagacagaagaattctcagtaacttccttgtgttgtgtttattcaactcacagagttgaatgatcgtttacacagagcagacttgaaacactctttttgtggaatttgcaagtggagatttcagccgctttgaggtcaatggtagaaaagtaaatatcttcgtataaagactagacagaatgattctcagaaactccttagtgatgtgtgcgttcaactcacagagtttaacctttctgttcatagagcagttaggaaacactctgtttgtaaagtctgcaagtggatattcagacccctttgaggccttcgttggaaacgggatttcttcatattatgctagacagaagaattcccagtaacttccttgtgttgtgtacattcaactcacagagttgaacgttcccttagacagagcagatttgaaacactctttttgtgcaattggcaagtggagatttcaagcgctttaaggtcaatggcagaaaaggaaatatcttcgtttcaaaactagacagaatcattcccacaaactgcgttgtgatgtgttcgttcaactcacagagtttaacctttcttttcatagagcagttaggaaacactctgtttgtaaatgtctgcaagtggatattcagacctccttgaggccttcattggaaacgggatttcttcatattctgctagacagaagaattctcagtaacttccttgtgttgtgtgtattcaactcacagagttgaacgatcctttacacagagcagacttgaaacactctttttgtggaatttgcaagtggagatttcagccgctttgagttcaatggtagaataggaaatattttcctatagaaactagacagaatgattctcagaaattcctttgtgatgtgtgcgttcaactcacagagtttaacctttcttttcatagagcagttaggaaacactctgtttgtaaagtctgcaagtggatattcagacctccttgaggccttcgttggaaacgggatttcttcatattatgctagacagaagaattcccagtaacttccttgtgttgtgtgtgttcaactcacagagttgaacgttcattaacacagagcagatttgaaacactctttttgtggaatttgcaaatggagatttcaagcgctttggggccaaaggcagaaaaggtaatatcttcgtttcaaaactagacagaatcattctcagaaactgctctgcgatgtgtgcgttcaactctcagagtttaacttttcttttcattcagcagtttggaaacactctgtttgtaaagtctgcacgtggataatttgaccacttagaggccttcgttggaaacgggtttttttcatgtaaggctagacagaagaattctcagtaacttccttgtgttgtgtgtattcaactcacacagctgaacgatcctttacacagagcagacttgtaacactctttttgtggaatttgcaagtggagatttcagccgctttgaagtcaaaggtagaaaaggaaatatcttcctataaaaactagacagaatcattcccacaaactgcgttgtgatgtgttcgttcaactcacagagtttaacctttctgttcatagagcagttaggaaactctctgtttctaaagtctgtaagtggatattctgacatcttgtggccttcgttggaaacgcgatttcttcatattctgctagacagaagaattctcagaaacttccttctgttgtgtgttttcaactcacagagttgaacgatgctttacacagagtagacttgaaacactctttttgtgtaatttgcaagtggagatttcagccgctttgaggtcaatggtagaaaaggaaatatcttcgtataaaaacaagacagaacgattctcagaaactcctttgtgatgtctgcgttcaactcacagagtttaacctttcttttcatagagcagttaggaaacactctgtttgtaaagtctgcaagtggatattcagacctctttgaggccttcgttggaaacgggtttttttcatgtaaggctagacagaagaattcccagtaacttccttgtgttgtgtgtgttcaactcacagagttgaactttcatttacacagaccagatttgaaacactctttttgtggaatttgcaagtggagatttcaagcgctttgaggccaaaggcagaaaaggaaatatcttcgtataaaaactagacagaatcattctcagaaactgctctgcgatgtgtgcgttcaactctcagagtttaacttttcttttcattcagcagtttggaaacactctgtttgtaaagtctgcacgtggatattttgaccacttagaggccttcgttggaaacgggtttttttcctgtaaggctagacagaagaattcccagtaactttccttgtgttgtgtacattcaactcacagagttgaacgttcccttagacagagcagatttgaaacactctttttgtgcaattcgcaaatggagatttcaagcgctttaagttcaatggcagaaaaggaaatatcttcgtttcaaaactagacagaatcattcccacaaactgcgtattgatgtgttcgttcaactcacagagtttaacctttcttttcatagagcagttaggaaacactctgtttgtaaattctgtaagtggatattctgaaatcttgcggccttcgttggaaacgggctttcttcatattctgctagacagaataattctcagtaacttccttgtgttgtgtgtattcaactcacagagttgaaggatcctttacagagagcaggcttgaaacactctttttgtcgaatttgcaagtggagatttcagccgctttgaggtcaatggtagaataggaaatatcttcttatagaaactagacagaatgattctcagaaactcccttgtgatgtgtgcgttcaactcacagagtttaacctttcttttcatagagcagttaggaaacactctgtttgtaaactctgcaagtggatattcagacctctttgaggccttcgttggaaacgggatttcttcatattatgctagacagaagaattcccagtaacttccttgtgttgtgtgtgttcaactcacagagttgaactttcatttacacagagcagatttgaaacactctttttgtggaatttgcaagtggagatttcaagcgctttgaggccaaaggcagaaaaggaaatatcttcgtatgaaaactagacagaatcattctcagaaactgctctgcgatgtgtgcgttcaactctcagagtttaacttttcttttcattcagcagtttggaaacactctgtttgtaaagtctgcgcgtggataatttgaccacttagaggccttcgttggaaacgggtttttttcatataaggctagacagaagaattcccagtaacttccttgtgttgtgtgcattcaactcacagagttgaacgttcccttagacagagcagatttgaaacactctatttgtgcaatttgcaagtgtagttttcaagctctttaaggtcaacggcagaaaaggaaatatcttggtttcaaaactagacagaatcattcccacaaactgcgttgtgctgtgttcgttcaactcacagagtttaacctttctgttcatagagcagttaggaaacactctgtttgtaaagtctgtaagtggatattcagacatcttgtggccttcgttggaaacgggatttcttcatattctgctagacagaggaattcccagtaacttccttgtgttgtgtgcattcaactcacagagttgaatgattctttacacagagcagatttgagacactcttttggtggaatttgtaagtggagaattcagccgctttgaggtcaatggtagaaaaggaaatatcttcgtataaaaactagacagaatgattctcagaaactcctttgtgatgtgtgcgttcaactcacagagtttaacttttcttttcatagagcagttaggaaacactctgtttgtaaagtctgcaagtggatattcagacctctttgaggccttcgttggaaacgggatttcttcctattctgctagacagaagaattctcagtaacttccttgtgttgtgtgtattcaactcacagagttgaacgatcctttacacagagcagacttgaaacactctttttgtggaatttgcaagtggagatttcagccgctttcaggtcaatggtagaataggaaatatcttcatatagaaactagacagaatgattctcagaaactcctttgtgatgtgtgcgttccactcacacagtttaacctttcttttcatagagcagttaggaaacactctgtttgtaaagtctgcaagtggatattcagacctccttgaggcattcgttggaaacgggatttcttcatattatgctagacagaagaattcccagtaacttccttgtgttgtgtacattcaactcacagagttgaacgatcccttagacagagcagatttgaaacactctttttgtggaatttgcaaatggagatttcaagcgctttgaggccaaaggcagaaaaggaaatatcttcgtataaaaactagacagaaatgattctcagaaactcctttgtgatgtgtgcgttcaactcacagagtttaacctttcttttcatagagcagttaggaaacactctgtttgtaaagtctgcaagtggatattcagacctctttgaggccttcgttggaaacgggttttcttcatattctgctagacagaagaattctcagtaacttccttgtgttgtgtgtattcaactcacagagttgaacgatcctttacacagagcagtcttgaaacactctttttgtggaatttgcaagtggagatttcagccgctttgaggtcaatagtagaaaaggaaatatcttcgtagaaaaactaggcagaatgattctcagaaactcctttgtgatgtgtgcgttcaactcatagagtttaacctttcttttcatagagcagttaggaaacactctgtttgtaaagtctgcaagtggatattcagacctctttgaggccttcgttggaaacgggatttcttcatattctgctagacagaataattctcagtaacttccttgtgttgtgtgtattcaactcacagagttgaacgatcctttacagagagcagacttgaaacactctttttgtggaatttgcaagtggagatttcagccgctttgaggtcaatagtagaaaaggaaatatcttcgtagaaaaactagacagagtgattctcagaaactcctttgtgatgtctgcgttcaactcacagagtttaacctttcttttcatagagcagttaggaaacactctgtttgaaaagtctgcaagtggatattcagacctccttgaggccttcgttggaagcgggatttcttcatattctgctatacagaagaattctcagaaacttccttgtgttgtgtgtattcaactcacagagttgaacgatcgtttacacagagcagacttgagacactcttttttggaatttgtaagtggagatttcagccgctttgaggtcaatggtagaaaaggaaatatcttcacataaaaactagacagaatgattctcagaaactcctttgtgctgtgtgcgttcaactcacagagtttaacctttcttttcatagagcagttaggaaacactctgtttgttaagtctgcaggtggatattcagacctctttgaggccttcgttggaaacgggatttcttcatattatgctagacagaagaattctcagtaacttccttgtgttgtgtgtattcaactcacagagttgaacgatcctttacacagagcagacttgaaactctctttttgtggaatttgcaagtggagatttcagccgctttgaggtcaatagtagaaaaggaaatatctttcgtagaaaaactagacagaatgattctcagaaactcctttgggatgtgtgtgcccaactcacagagtttaacctttcttttcatagagctgttaggaaacactctgtttgtaaagtctgcaagaggatattcagacctctttgaggccttcgttggaaacgggtttttttcatataaggctagacagaagaattcccagtaacttccttgtgttgtgtgtgttcaactcacagagttgaactttgatttacacagagcagatttgaaacactctttttgtggaattttcaagtggagatttcaagcgctttgaggccaaaggcagaaaaggaaatatcttcgtataaaaactagacagaatcattctcagaaactgctgcgtgatgtgtgccttcaactctcagagtttaacttttcttttcattcagcggtttggaaacactctgtttgtaaagtctgcacgtggaaattttgaccacttagaggccttcgttggaaacgggtttttttcatgtaaggctagacagaagaattctcagtaacttccttgtgttgtgtgtattcaactcacagagttgaacgatcctttacacagagcagacttgaaacacactttttgtggaatttgcaagtggagatttcagccgctttgaggtcaatggtagaataggaaatatcttcttatagaaactagacagaatgatctcagaaactcctttgtgatgtgtgccttcaactcacagagtttaacctttcttttcatagagcagttaggaaacactctgtttgtaaagtctgcaagtggatattcagacctctttgaggccttcgttggaaacgggatttcttcatattctgctagacagaagaattctcagtaacttccttgtgttgtgtgtattcaactcacagagttgaacgatcctttacacagagcagacttgaaacactctttttgtggaatttgcaagtggagatttcagccgctttgaggtcagtagtagaaaaggaaatatcttcgtagaaaaactagacagaatgattctcagaaactcctttgtgatgtgggcgttgaactcacagagtttaacctttcttttcatagagcagttaggaaacactctgtttgtaaagtctgcaagtggatattcagacctctttgaggctttcgttggaaacgggatttcctcatattctgctagacagaagaattcccagtaacttccttgtgttgtgtgtgttcaactcacagagttgaactttcatttacacagagcagatttgaaacactctttttgtggaatttgcaaatggagatttcaagcgctttgaggccaaaggcagaaaaggaaatattctttgtataaaaactagacagaaccattctcagaaactgctctgcgatgtgtgcgttcaactctcagagtttaacttttcttttcattcagcagtttggaaacactctgtttgtaaagtctgcacgtggataatttgaccacttagaggccttcgttggaaacgggtttttttcatgtaaggctagacagaagaattcccagtaacttccttgtgttgtgtgcattcaactcacagagttgaacgttcccttagacagtgcagatttgaaacactctatttgtgcaatttgcaagtgtagatttcaagcgctttaaggtcaatggcagaaaaggaaatatcttcgtttcaaaactagacagaatgattctcagaaactcctttgtgatgtgtgcgttcaactcacagagttcaacctttcttttcatagagcagttaggaaacactctgtttgtaatgtctgcaagtggatcttcagacctctttgaggccttcgttggaaacgggttttcttcatattatgctagacagaagaattctcagtaacttccttgtgttgtgtgtattcaactcacagagttgaacgatcctttacacagagcagacttgaaacactctttttgtggaatttgcaagtggagatttcagccgctttgaggtcaatggtagaataggaaatatcttcctataaaaactagacagaatgattctcagaaaatcttttgtgatgtgtgcgttcaactcacagagtttaacttttcttctcatagagcagttaggaaacactctgtttgtaaagtctgcaagtggatattcagacctctttgaggtcttcgttggaaacgggatttcttcatattatgctagacagaagaattctcagtaacttccttgtgttgtgtgtattcaactgacagagttgaacttttatttagagagagcagatttgaaactctgtttttgtggaatttgcaagtggagatttcaagcgctttggggccaaaggcagaaaaggaaatatcttcgtataaaaactagacagaatcattctcagaaactgctgggtgatgtgtgcgttcaactctcagagtttaacttttcttttcattcagcggtttggaaacactctgtttgtaaagtctgcacgtggatattttgaccacttagaggccttcgttggaaacgggttttttgcatgtaaggctagacagaagaattcccagtaacttccttgtgttgtgtacattcaactcacagagttgaacgttcccttagacagagcagatttgaaacactctttttgtgcaattggcaagtggagatttcaagcgctttaaggtcaatggcagaaaaggaaatatcttcgtttcaaaattagacagaatgattctcagaaactcctttgtgatgtgtgcgttcaactcacagagttcaacctttcttttcatagagcagttgggaaacactctctttgtaaagtctgcaagtggatattcagacttctttgaggccttcgttggaagcgggatttcttcatattctgctagacagaagaattctcagtaacttccttgtgttgtgtgtattcaactcacagagttgaacgatcctttacacagagcagacttgaaacactctttttgtggaatttgcaagtggagatttcagccgctttgaggtcaatggtagaataggaaatatcttcctatagaaactagccagaatgattctcagaaactcctttgtgatttgggtgttcaactcacagagtgtaacctttcttttcatagagcagttaggaaacactctgtttgtaaagtctgcaagtggatatttttacctctttgaggccttcgttggaaacgggtttttttcatgtaaggctagacagaagaattctcagtaacttccttgtgttgtgtgtattcaactgacagagttgaactttcatttagagagagcagatttgaaacactctttttttggaatttgcaagtggagatttcaagcgctttgaggccaaaggcagaaaaggaaatatcttcgtataaaaactagacagaatcattctcagaaactgctctgcgatgtgtgcgttcagatctcagagtttaacttttcttttcattcagcagtttggaaacactctgtttgtaaagtctgcacgtggatattttgaccacttagaggccttcgttggaaacgggattttgtcatgtaaggctagacagaagaattcccagtaacttccttgtgttgtgtacattcaactcacagagttgaacgttcccttatacagagcagatttgaaacactctttttgtgaaattggcaagtggagatatcaagcgctgaaggtcaatggcagaaaaggaaatatcttcgtttcaaaactagacagaatcattcccacaaactgcgttgtgatgtgttcgttcaactcacagagtttaacctttcttttcatagagcagttaggaaacagtctgtttgtcaattctgtaagtggatattctgacatcttgtggccttcgttggaaacgggattttttcatattctgctagacagaagaattctcagtaacttccttgtgttgtgtgtattcaactcacagagttgaacgatcctttacagagagcagacttgaaacactctttttgtggaatttgcaagtggagatttcagccgctttgaggtcaatggtagaataggaattatcttcctatagaaactagacagaatgattctcagaaactcctttgtgatgtgtgcgttgaactcacagagtttaaccttgcttttcatagagcagttaggaaacactctgtttgtaatgtctgcaagtggatattcagacctccttgaggccttcgttggaaaagggatttcttcatattatgctagacagaagaattctcagaaacttccttgtgttgtgtgttttcaactcacagagttgaacgatcctgtacacagagcagacttgaaacactctttttgtggaatttgcaagtggagatttcagccgctttgaggtcaatggtagaataggaaatatcttcctatagaaactagacagaatcattctcagaaactgctctgcgatgtgtgcgttcaactctcagagtttaacttttcttttcattcagcagtttggaaacactctgtttgtaaagtctgcacgtggatattttgaccacttagaggccttcgttggaaacgggtttttttcctgtaaggctagacagaagaattctcagtaacttccttgtgttgtgtacattcagctcacagagttgaacgttcccttagacagagcagatttgaaacactctttttgtgcaattggcaagtggtgatttcagccgctttgaggtcaatggtagaaaaggaaatatcttcgtataaaaactagacagaatcattcccacaaactgcgttgtgatgtgttcgttcaactcacagagtttaacctttcttttcatagagcagttaggaaacagtctatttgaaaattctgtaagtggatattctgacatcttgtggccttcgttggaaacgggatttcttcatattctgctagacagaagaattctcactaacttccttgtgttgtgtgtattcaactcacagagttgaacgatcctttacacagagcggacttgaaacactcattttgtggaatttgcaagtggagatttcagccgcgttgaggtcaatggtagaaaaggaaatatcttcgtataaaaactagacagaatgattctcagaaactcctttgtgatgtgtgtgttcaactcacagagtttcacctttcttttcatagagcagataggaaacactctgtttgtaaagtctgcaagtggatattcacacctctttgaggccttcgttggaaacgggtttttttcatataaggctagacagaagaattcccagtaacttcccttgtgttgtgtgtgttcaactcacagagttgaactttcatttacacagagcagatttgaaacactctttttgtggaatttgcaaatggagatttcaagcgctttgaggccaaaggcagaaaaggaaatatcttcgtttcaaaactagacagaatcattctcagaaactgctctgcgatgtgtgcgttcaactctcagagtttaacttttcttttcattcagcagtttggaaacactctgtttgtaaagtctgcacgtggatattttgaccacttagaggccttcgttggaaacgggttttttcctgtaaggctagacagaagaattcccagtaacttccttgtgttgtgtacattcaactcacagagttgaacgttcccttagaaagagcagatttgaaacactctttttgtgcaattggcaagtggagatttcaagcgatttaaggtcaatggcagaaaaggaaatatcttcgtttcaaaactagacagaatgattctcagaaactcctttgtgatgtgtgcgttcaactcacagagtttaacctttctgttcatagagcagttaggaaacactctgtttgtaaagtctgcaagtggatattcagacctctttgaggccttcgttttaaacgggatttcttcatattatgctagacagaataattctcagtaacttccttgtgttgtgtgtattcaactcacagagttgaacgatcctttacacagagcagacttgaaacactctatttgtagaatttgcaagtggagatttcagccgctttgaggtcaatagtagaaaaggaaatatcttcgtagaaaaactagacagaatgattctcagaaactcctttgtgatgtgtgcattcaactcacagagtttaacctttcttttcatagagcagttaggaaacactctgtttgtaaagtctgcaactggatattcagacctctttgaggccttcgttggaaacgggatttcttcatattatgctagacagaagaattctcagtaaattccttgttttgtgtgtattcaactcacagagttggacgatcctttacacagagcaaacttgaaacactctttttgtggaatttgcaattggagatttcagccgctttgaggtcaattgtagaaaaggaaatatcttcgtataaaaactagacagaatgattctcagaaactcccttgtgatgtgcgcgttcaactcacagagtttaacctttcttttcatagagcagttaggaaacactcagtttgtaaagtctgcaagtggatattcagacctccttgaggccttcgttggaaacgggatttcttcatattatgctagacagaagaattcccagtaacttccttgtgttgtgtacattcaactcacagagttgaacgttcccttagacagagcagatttgaaacactctttttgtgcaattggcaaatggagatttcaagcgctttaaggtcaatggcaggaaaggaaatatcttcgtttcaaaactagacagaatcattcccacaaactgcgttgtcatgtgttcgttcaactcacagagtttaacctttcttttcatagagcagttaggaaacagtctgtttgtaaattctgtaagtggatattctgacatcttgtggccttcgttggtaacgggatttcttcatattctgctagacagaataattctcagtaacttccttgtgttgtgtgtattcaactcacagatttgaaggatcctttacagagagcaggcttgaaacactcttcttctcgaatttgcaagtggagatttcagccgctttgaggtcaatggtagaaaagtaaatatcttcgtataaagacgagacagaattattctcagaaactcctttgtgatgtgtgcgttcaactcacagagtttaacctttcttttcatagagcagttaggaaacactctgtttgtaaagtctgcaagtggatattcagacatctttgaggctttcgttgaaaacgggatttcttcatattatgctagacagaagaattcccagtaacttccttgtgttgtgtgtgttcaactcacagagatgaactctcatttacacagagcagatttgaaactctctttttgtggaatttgcaaatggagatttcaagcgctttgaggccaaaggcagaaaaggaaatatcttcgtataaaaactagacagaatcattctcagaaactgctgcgtgatgtgtgcgttcaactctcagagtttaacttttcttttcattcagcggtttggaaacactctgtttgtaaagtctgcacgtggaaattttgaccacatagaggccttcgttggaaacgggtttttttcatgtaaggctagacagaagaattcccagtaacttccttgtgttgtgtgcattcaactcacagagttgaacgttcccttagacagagcagatttgaaacactctatttgtgcaatttgcaagtgtagatttcaagcgctttaaggtcaatggcagaaaaggaaatatcttcgtttcaaaactagacagaatgattctcagaaactccttcgtgatgtgtgcgttcaactcacagagtttaacctttcttttcatagagcagttaggaaacactctgtttgtaaagtctgcaagtggatattcagacctctttgaggccttcgttggaaacgggatttcttcatattctgctagacagaagaattctcagtaacttccttgtgttgtgtgtattcaactcacagagttgaacgatcctttacacagagcagacttgaaacactctttttgtggaatttgcaagtggagatttctgccgctttgaggtcaatggtagaataggaaatatcttcctatagaaactagacagaatgattctcagaaacttctttgtgatgtgtgtgttcaactcacagtgtttaacctttcttttcatagagcagttaggaaacactgtgtttttaaactctgcaagtggatattcagacctctttgaggccttcgttggaaacgggtttcttcatactgtgctagacagaagaattctcagtaacttaccttgtgttgtgtgtattcaactcacagagttgaacgatcctttacacagagcagacttgtaacactctttttgtggaatttgcaagttgagatttcagccgctttgaagtcaaagatagaaaaggaaatatcttcctataaaaactagacagaatgattctcagaaactcctttgtgatgtgtgcgttcaactcacagagtttaacttttcttttcatagagcagttaggaaacactctgtttgtaaagtctgcaagtggatattcagacctctttgaggccttcgttggaaacgggatttattcatattctgctagacagaagaattcccagtaacttccttgtgttgtgtgcattcaactcacagagttgaacgttcccttagacagaggagatttgaaacactctatttgtgcaatttgcaagtgtagatttcaagcgctttaaggtcaatggcagaaaaggaaatatcttcgtttcaaagctagacagaatcattcccacaaactgcgttgtgatgtgttcgttcaactcacagagtttaacctttctgttcatagagcagttaggaaacactctgtttgtaaagtctgcaagtggatattcagacctccttgaggccttcgttggaaactggatttcttcatattctgctagacagaagaattctcagtgacttccttgtgttgtgtgtattcaactcacagagttgaacgatcctttacacagagcagacttgaaacactctttttgtggaatttgcaagtggagatttcagccgctttgaggtcaatggtagaataggaaatatcttcctatagaaactagacagaatgattctcagaaactcctttgtgatgtgtgtgttcaactcacagagtttaacctttcttttcatagagcagttaggaaacactctgtttgtaaagactgcaagtggatattcaggcctctttgaggccttcgttggaaacgggtttttttcatataaggctagacagaagaattctcagtaacttcccttgtgttgtgtgtattcaactgacagagttgaactttcatttggagagagcagatttgaaacactgtttttgtggaatttgcaagtggagatttcaagcgctttgcggccaaaggctgaaaaggaaatatcctcgtataaaaacaagacagaatcattctcagaaactgctctgtgatgtgtgcgttcaactctcagagtttaacttttcttttcattcagcagtttggaaacactctgtttgtaaagtctgcacgtggataacttgaccacttagaggccttcgttggaaacgggtttttttcatgtaaggctagacagaagaattcccagtaacttccttgtgttgtgtacattcaactcacagagttgaacgttcccatagacagagcagatttgaaacactctttttgtgcaattggcaagtggagatttcaagcgctttaaggtcaatggcagaaaaggaaatatcttcgtttcaaaactagacagaatcattcccacaaactgcgttgtgatgtgttcgttcaactcacagagtttaacctttcttttcatagagcagttaggaaacagtctgtttgtaaattctgtaagtggatattctgacatcttgtggccttcgttggaaacgggatttcttcatattctgctagacagaagaattctcagtaacttccttgtgttgtgtttattcaactcacagagttgaacgatcctttacacagagcagacttgaaacactctttttcttgaatttgcaagtggagatttcagccgctttgaggtcaatggtagaaaaggaaatatcttcgtataaagactagacagaatgattctcagaaacttcattgtgacgtgtgcgttcaactcacagagtttaacctttcttttcatagagcagttaggaaacactctgtttgtaaagtctgcaagtggatattcagacctctctgaggccttcgttggaaacgggatttcttcatactgtgctagacagaagaattctcagtaacttccttgtgttgtgtgtattcaactcacagagttgaacgatcctttacacagagcagacttgaaccattctttttgtggaatttgcaagtggagatttcagccgctttgaggtcaatggtagaataggaaatatcttcctatagaaactagacagaatcattctcagaaactgctctgcgatgtgtgcgttcaactctcagagtttaacttttcttttcattcagcagtttggaaacactctgtttgtaaagtctgcacgtggatattttgaccacttagaggccttcgttggaaacgggtttttttcctgtaaggctagacagaagaattcccagtaacttccttgcgttgtgtacattcaactcacagagttgaacgttcccttagacagagcagatttgaaacactctttttgtgcaattggcaagtggagatttcaagcgctttaaggtcaatggcagaaaaggaaatatcttcgtttcaaaactagacagaaatcattcccacaaactgcgttgtgatgtgttcgttcatctcacagagtttaacctttcttttcgtagagcagttaggaaacagtctgtttgtaaattctgtaagtggatattctgacatcttgtggccttcgttggaaacgggatttcttcatattctgctagacagaagaattctcagaatcttccttgtgttgtgtgtattcaactcacacagttgaacgattgtttacacagagcagatttgaaacactctttctgtggaatttgcaagtggagatttcagccgctttgaggtcaatggtagaaaaggaaatatcttcgtataaaaaactagacagaatgattctcagaaactcctgtgtgatgtgtgcgttcaactcacagagtttaacctttcttttcatagagcagttaggaaacactctgtttgtaaagtctgcaagtggatattcagacctctttgaggccttcgtgggaaacgggtttttttcatataaggctagacagaagaattcccagtaacttccttgtgttgtgtgtgttcaactcacagagttgaactttcatttacacagagcagatttgaaacactctttttgtggaatttgcaagtggagatttcaagcgctttgaggccaaaggcagaaaaggaaatatcttcttttgaaaactagacagaatcattctcagaaactgctctgcgatgtgtgcgttcaactctcagagtttaacttttcttttcattcagcagtttggaaacactctgtttgtaaagtctgcacgtggatattttgaccacttagaggccttcgttggaaacgggtttttttcctgtaaggctagacagaagaattcccagtaacttccttgtgttgtgtgcattcaactcacagagttgaacgttcccttagacagagcagatttgaaacactctatttgtgcaatttgcaagtgtagatttcaagcgcattaaggtcaatggcagaaaaggaaatatcttcgtttcaaaattagacagaatcattcccacaaactgcgttgtgatgtgttcgttcaactcacagagttttacctttctgttcatagagcagttaggaaacactctgtaaagtctgtaagtggatattctgacatcttgtggccttcgttggaaacgggatttcttcatattctgctagacagaagaattcccagtaacttccttgtgttgtgtgtgttcaactcacagagttgaactttcatttacacagagcagatttgaaacactctttttgtgcaattggcaagtggtgatttcagccgctttgaggtcaatggtagaaaaggaaatatcttcgtataaaaactagacagaatgattctcagaaactcctttgtgatgtgtgcgttcaactcacagagtttaacctttcttttcatagagcagttaggaaacactctgtttgtaaagtctgcaagtggatattcagacctctttgaggccttcgttggaaacgggttttattcatataaggctagacagaagaattcccagtaacttccttgtgttgtgtgtgttcaactcacagagttgaactttcatttacacagagcagatttgaaacactctttttgtggaatttgcaggtggagatttcaagcgctttgaggccaaaggcagagaaggaaatatcttcgtataaaacctagacagaatcattctcagaaactgctgcgtgatgtgtgcgttcaactctcagagtttaacttttcttttcattcagcggtttggaaacactctgtttgtaaagtctgcacgtggatattttgaccacttagaggccttcgttggaaacgggttttttttcatgtaaggctagacagaagaattctcagtaacttccttgtgttgtgtgtattcaactcacagagttgcacgatcctttacacagagcagacttgaaacactctttttgtggaatttgcaagtggagatttcagccactttgaggtcaatggtagaataggaaatatcttcctatagaaactagacagaatgattctcagaaactcctttgtgatgtgtgcgttcaactcacagaatttaacatttcttttcatagagcagttaggaaacactctgtttgtaaagtctgtaagtggatattcagacctctttgaggccttcgttggaaacgggatttcttcgtattctgctagacagaagaattctcagtaacttccttgtgttgtgtgtattcaactcacagagttgaacgatcctttacagagagcagacttgaaacactctttttgtggaatttgcaagtggagatttcagccgctttgaggtcaatggtagaataggaaatatcttcgtagaaaaactagacagaatgattctcagaaactcccttgtgatgtgtgcgttcaactcacagagtttaacctttcttttcatagagcagttaggaaacactctgtttgtaaagtctgcaagtggatattcagacctccttgaggccttcgttggaaacgggatttcttcatattatgctagacagaagaattctcagtaccttccttgtgttgtgtgtattcaactcacagagttgaacgatcctttacacagagcatacttgaaacactcttgttgtggaatttgcaagtggagatttcagccgctttgaggtcaatggtagaataggaaatatcttcctatagaaactagacagaatgattctcagaaactcctttgtgatgtgtgcgttgaactcacagggtttaacctttcttttcatagagcagttaggaaacactctctttgtaaagtctggaagtggatattcagacctccttgaggccttcgttggaaacgggatttcttcatattatgctagacagaagaattcccagtaacttccttgtgttgtgtacattcaactcacggagttgaacgttcccttagacagagcagatttgaaacactctttttgtgcaattggcaaatggagatttcaagcgctttaaggtcaatggcagaaaaggaaatatcttcgtttcaaaactagacagaatcattcccacaaactgcgttgtgatgtgttcgttcaactcacagagtttaacctttcttttcatagaacagttaggaaacagtctgtttgtaaattctgtaagtggatattctgatatcttttggccttcgttggaaacgggatttcttcatattctgctagacagaagaattctcagtaacttccttgtgttgtgtgtattcaactcacagagttgaacgatcctttacacagagcagacttgaaacactctttttgtggaatttgcaagtggagatttcagccgctttgaggtcaatggtagaaaaggaaatatcttcgtataaagactagacagaatgattctgagaaactcctttctgatgtgtgcgttcaactcacagagtttaacctttcttttcatagagcagttaggaaacactctgtttgtaaagtctgcaagtggatattcagacctccttgaggccttcgttggaaacgggatttcttcatattatgctagacagaagaattcccagtaacttccttgtgttgtgtgtgttcatctcacagagttgaactttcatttacacagagcagatttgaaacactctttttgtggaatttgcaggtggagatttcaagcgctttgaggccaaaggcagaaaaggaaatatcttcgtataaaaactagacagaatcattctcagaaactgctctgcgatgtgtgcgttcaactctcagagtttaacttttcttttcattcagcagtttggaaacactctgtttgtaaagtctgcacgtggatattttgaccacttagaggccttcgttggaaacgggtttttttcctgtaaggctagacagaagaattcccagtaacttccttgtgttgtgtacattcaactcacagagttgaacgtttccttagacagagcagatttgaaacactctttttgtgcaattggcaagtggagatttcaagcgctttgaggtcaatggcagaaaaggaaatatcttcgtttcaaaactagacaaaatcattcccacaaactgcgttctgatgtgttcgttcaactcacagagtttaacctttctgttcatagagcagttaggaaacactctgtttgtaaagtctgtaagtggatattctgacatcttgtggccttcgttggaaacgggatttcttcatattctgctagacagaagaattctcagtaacttccgcgtgttgtgtgtattcaactcacagagctgaacgatcctttacacagagtagacttgaaacactctttttgtggaatttgcaagtggagatttcagccgctttgaggtcaatggtagaaaaggaaatatcttcctataaaaactagacagaatgattctcagaaactcctttgtgatgtgtgcgttcaactcacagagtttaacctttcttttcatagcgcagttgggaaacacactgtttgtaaagtctgcaagtggatattcagacatccttgaggctttcgttggaaacgggatttcttcatattctgctagaaagaagaattctcagtaacttccttgtgttgtgtgtattcaactcacagagttgaacgatcctttacagagagcagacttgaaacactctttttgtggaatttgcaagtggagatttcagccgcttttctggtcaatggtagaataggaaatatcttccaatagaaactagacagaatgattctcagaaactcctttgtgatgtgtgcgttcaactcacagagtttaacttttcttttcatagagcagtaaggaaacactctgtttgtaaagtctgcaagtggatattcagacctctttgaggccttcgttggaaacgggatttcttcatattctgctagacagaagaattcccagtaacttccttgtgttgtgtgcattcaactcacagagttgaacgttcccttagacagagaagatttgaaacactctatttgtgcaatttgcaagtgtagatttcaagcgctttaaggtcaacggcagaaaaggaaatatcttcgtttcaaaaccagacagaatcattcccacaaactgcgttgtgatgggttcgttcaactcacagagtttaacctttccgttcatagagcagttaggaaacacactgtttgtaaagtctgtaagtggatattctgacatcttgtggccctcgttggaaacgggatttcttcatattctgctagacagaagaattctcagaatcttccttgtgttgtgtgtattcaactcacagagttgaacgatcctttacacagagcagacttgaaacactctttttgtggaatttgcaagtggagatttcagccgctttgaggtcccatggtagaaaaggaaatatcttcgtataaaaactagacagaatgattctcagaaacttctttgtgatgtgtgtgttcaactgacagagtttaacctttcttttcatagagcagttaggaaacactctgtttgtaaactctgcaagtggatattcagacctctttgaggccttcgttggaaacgggttttgttcatataaggctagacagaataattctcagtaacttccttgtgttgtgtttattcaactcacagagttgaatgatcctttacagagagcagacttgaaacactctttttgtggaatttgcaagtggagatttcagccgctttgaggtcaatggtagaaaagtaaatatcttcgtataaagactagacagaatcattctcagaaactgctctgcgatgtgtgcgttcaactctcagagtttaacttttcttttcattcagcagtttggaaacactctgtttgtaaagtctgcacgtggataatttgaccacttagaggccttcgttggaaacgggtttttttcatgtaaggctagacagaagaattcccagtaacttcattgtgttgtgtacattctactcacagagttgaacgttcccttagacagagcagatttgaaacactctttttgtgcaattggcaagtggtgatttcaaccgctttgaggtcaatggtagaaagggaaatatcttcgtattaaaactagacagaatcattcccacaaactgcgttgtgatgtgttcgttcaactcacagagtttaacctttctgttcatagagcagttaggaaaaactctgtttgtaaagtctgtaagtagatattctgacatcttgtggccttctttggaaacgggatttcttcatattctgctagacagaagaattctcagtaacttaccttgtgttgtgtgtattcaactcacagagttgaacgatcctttacacagagcagacttgaaacactctttttgtggaattttgcaagtggagatttcagccgctttgaggtcaatggtagaaaaggaaactatcttcatataaagactagacagaatgattctcaggaactcctttgtgatgtgtgagttcaactcacagagtttatcctttcttttcatagagcagttaggaaacactctgtttgtaaagtctgcaagtggatattcagacctctttgaggccttcgttggaaacgggatttcttcatattctgctagacagaagaattctcagtaacttccttgtgttgtgtgtattcaactgacagagttgaactttcatttggagagagcagatttgaaacactgtttttgtggaatttgcaagtggagatttcaagcgcttttgggccaaaggcagaaaaggaaatatcttcgtataaaaactagacagaatcattctcagaaactgctctgcgatgtgtgcgttcaactctcagagtttaacttttcttttcattcagcagtttggaaacactctgtttgtaaagtctgcacttggatattttgaccacttagaggccttcgttggaaacgggtttttttcctgtaaggctagacagaagaattcccagtaacttccttgtgttgtgtgcattcaactcacagagttgaacgttcccttagacagagcagatttgaaacactctatttgtgcaattggcaactgtagatttcaagcgtttaaggtcaatggcagaaaaggaaatatcttcgtttcaaaactagacagaatcattcccacaaactgcgttgtgatgtgttcgttcaactcacagagtttaacctttctgttcatagagcagttaggaaacactctgtttgtaaagtctgtaagtggatattctgacatcttgtggccttcgttggaaacgggatttcttcatattctgctagacagaaagaattctcagtaacttccttgtgttgtgtgtattcaactcacagtgttgaacgatcctttacacagagcatacttgaaacactctttttgtggaatttgcaagtggagatttcagccgctttgatgtcaatggtagaaaaggaaataacttcgtataaagactagacagatgattctcagaaactcctttgtgatgtgtgcgttcaactcacagagtttaacctttcttttcatagagcagttaggaaacactctgtttgtaaaagtctgcaagtggatattcagacctctttgaggccttcgttggaaacgggtttttttcatataaggctagacagaagaattctcagtaacttccttgtgttgtgtgtattcagctgacagagttgaactttcatttagagagagcagatttgaaacactgtttttgtggaatttgcaagtggagatttcaagcgctttggggccaaaggcagaaaaggaaatatcttcgtataaaaactagacagaatcattctcagaaactgctctgctgatgtgtgcgttcaactctcagagtttaacttttcttttcattcagcagtttggaaacactctgtttgtaaagtctgcacgtggatattttgaccatttagaggctttcgttggaaacgggtttttttcttgtaaggctagacagaagaattcccagtaacttccttgtgttgtgtgcaatcaaatcacagagttgaacgttcccttagacagagtagatttgaaacactctatttgtgcaatttgcaagtgtagatttcaagcgctttaaggtcaaaggcagaaaaggaaatatcttcgtttcaaaactagacagaatgattctcagaaacttctttgtgatgtgtgcgttcaactcagagagtttaacatttcttttcatagagcagttaggaaacactctgtttgtaaactctgcaagtggatattcagacctcttcgaggtcttcgttggaaacgggatttcttcatactgtgctagacagaagaattctcagtaacttccttgtgttgtgtgtattcaactcacagagttgaacgatcctttacacagagcagacttggaacactctttttgtggaatttgcaagtggagatttcagccgcgttgaggtcaatggtagaaaaggaaatatcttcgtataaaaactagacagaatgattctcagaaactcctttgtgatgtgtgcgttcaactcacagagtttaacctttctgttcatagagcagttaggaaacactctgtttgtaaagtctgcaagtggatattcagatcctccttgaggccttcgttggaaacgggatttcttcatattctgctagacagaagaattctcagtaacttccttgtgttgtgtgtattcaactgacagagttgaactttcatttagagagagcagatttgaaacactgtttttgtggaatttgcaagtggagatttcaagcgctttgggcccaaaggcagaaaaggaaatatcttcgtataaaaactagacagaatcattctcagaaactgctctgcgatgtgtgcgttcaactctcagagtttaacttttcttttcattcagcagtttggaaacactctgtttgtaaagtctgcacgtggatattttgaccacttagaggccttcgttggaaacgggtttttttcctgtaaggctagacagaagaattcccagtaacttccttgtgttgtgtacattcaactcacagagttgaaccgttcccttagacagagcagatttgaaacactctttttgtgcaattggcaagtggagatttcaagcgctttgaggtcaatggcagaaaaggaaatatcttcgtttcaaaactagacagaatgattctcagaaactcctttgtgatgtgtgcgttcaactcacagagtttaacctttcttttcatagagcagttaggaaacactctgtttgtaaagtctgcaagtggatattcagacatctttgaggctttcgttggaaacgggatttcttcatattctgttagacagaagaattctcagaaacttcgttgtgttgtgtgttttcaactcacagagttcaacgatcctttacacagagtagatttgaaacactctttttgtggaattggcagggtggagatttcagccgctttgaggtcaatggtagaaaaggaaatatcttcgtataaaaactagacagagtgattctcagaaactcctttgtgatgtctgcgtttaactcacagagtttaacctttcttttcatagagcagttaggaaacactctgtttgtaaagtgtgcaagtggatattcagacctccttgaggccttcgttggaaacgggatttcttcatattctgctatacagaagaattcccagtaacttccttgtgttgtgtgtgttcaactcacagagttgaactttcatttacacagagcagatttgaaacactctttttgtggaatttgcaaatggagatttcaagcgctttgaggccaaaggcagaaaaggaaatatcttcgtataaaaactagacagaatcattctcagaaactgctctgcgatgtgtgcgttcaactctcagagtttaacttttcttttcatttagcagtttggaaacactctgtttgtaaagtctgcacgtggatattttgaccacttagaggcctacgttggaaacgggtttttttcctgtaaggctagacagaagaattcccagtaacttccttgtgttgtgtacattcaactcacagagttgaacgttcccttagacagagcagatttgaaacactctttttgtgcaattggcaaatggagatttcaagcgctttaaggtcaatggcagaaaaggaaatatcttcgtttcaaaactagacagaatcattcccacaaactgcgttgtgatgtgttcgttcaactcacagcagtttaacctttctgttcatagagcagttaggaaacactctgtttgtaaagtctgtaagtgcatattctgacatcttgtggccttcgttggaaacgggatttcttcatattctgctagacagaagaattctcagtaacttccttgtgttgtgtgtattcaactcacagagttgaacgatcctttacacagagcagacttgaaacactctttttgtggaatttgcaagtggagatttcagccgctttgatgtcaatggtagaaaaggaaatatcttcgtataaagactagacagaatgattctcagaaactcttttgtgatgtgtgcgttcaactcacagagtttaacctttcttttcatagagcagttaggaaacactctgtttgtaaagtctgcaagtggatattcagacctctttgaggccttcgttggaaacgggatttcttcatattctgctagacagaagaattctcagtaactaccttgtgttgtgtgtattcacctgacagagttgaacattcatttagagagagcagatttgaaacactgtttttgtggaatttgcaagtggagatttcaagaggtttggggccaaaggcagaaaaggaaatatcttcgtataaaaactagacagaatcattctcagaaactgctctgcgatgtgtgcgttcaactctcagagtttaacttttcttttcattcagcagtttggaaacactctgtttgtaaagtctgcacgtggatattttgaccacttagaggccttcgttggaaacgggctttttcctgtaaggctagacagaagaattcccagtaacttccttgtgttgtgtacattcaactcacagagttgaacgttcccttagacagagcagatttgaaacactctttttgtgcaattggcaaatggagatttcaagcgctttaaggtcaatggcagaaaaggaaatatcatcgtttcaaaactagacagaatgattctcagaaactcctttgggatgtgcgcgttcaactcacagagtttaacctttcttttcatagagcagttaggaaacactctgtttgtaaagtctgcaagtggatattcagacatccttgaggctttcgttggaaacgggatttcttcatattctgctagaaagaagaattctcagtaacttccttgtgttgtgtgtattcaactcacagagttgaacgatcctttacacagagcagacttgaaacactctttttgtgtaatttgcaagtggagatttcagccgctttgagttcaatggtagaataggaaatatcttcctatagaaactagacagaatgattctcagaaactcctttgtgatgtgtgcgttcaactcacagagttcaacctttcttttcatagagcagttgggaaacactctgtttgtaaagtctgcaagtggatattcagacttctttgaggccttcgttggaagcgggatttcttcatgttctgctagagagaagaattctcagaaacttccttgtgttgtgtgttttcaactcacagagttgaacgatcctttacacagagcagacttgaaacactctttttgtggaatttgcaagtggagatttcagcctctttgaggtcaatggtagaataggaaatatcttcctatagaaactagacagaatcattctcagaaactgctctgcgatgtgtgcgttcaactctcagagtttaacttttcttttcattcagcagtttggaaacactctgtttgtaaagtctgcacgtggatattttgaccatttagaggccttcgttggaaacgggtttttttcttgtaaggctagacagaagaattcccagtaacttccttgtgttgtgtgcattcaactcacagagttgaacgttcccttagacagagcagatttgaaacactctatttgtgcaatttgcaagtgtagatttcaagcgctttaaggtcaacggcagaaaaggaaatatcttcgtttcaaaactagacagaatcattcccacaaactgcgttgtgatgtgttcgttcaactcacagagtttaacctttctgttcatagagcagttaggaaacactctgtttgtaaagtctgcaagtggatattcagacctccttgaggccttcgttggaaacgggatttcctcatattctgctagacagaataattgtcagtaacttccttgtgttgtgtgtattcaactcacagagttgaacgatcctttacagagagcacacttgaaacactctttttgtggaatttgcaagtggagatttcagccgctttgaggtcaatggtagaataggaaatatcttcctatagaaactagacagaatgattctcagaaagtcctttgtgatgtgtgtgttcaaatcacagagtttaacctttcttttcatagagcagttagtaaacactctgtttataaagtctgcaagtggataatcagacccctttgaggccttcgttggaaacgggatttcctcatattatgctagacagaagaattcccagtaacttccttgtgttgtgtgtgttcaactcacagagttgaactttcatttacacagagcagatttgaaacactctttttgtggaatttgcaagtggagatgtcaagcgctttgaggccaaaggcagaaaaggaaatatcttcgtaaaaaaactagacagaatcattctcagaaactgctctgcgatgtgtgcgttcaactctcagactttaacttttcttttcattcagcagtttggaaacactctgtttgtaaagtctgcacgtggataatttgacaacttagaggccttcgttggaaacgggttttttcatgtaaggctagacagaagaattcccagtaacttccttgtgttgtgtacattcaactcacagagttgaacgttccgttagacagagcagatttgaaacactctttttgtgcaattggcaaatggagatttcaagcgctttaagttcaatggcagaaaaggaaatatcttcgtttcaaaactagacagaatcattgccacaaactgcgttgtgatgtgttcgttcaactcacagagtttaacctttcttttcatagagcagttaggaaacagtctgtttgtaaattctgtaagtggatattctgacatcttgtgaccttcgttggaaacgggatttcttcatattctgctagacagaagatttctcagaaatttccttgtgttgtgtgtattcaactcacagagttgaacgatcctttactcagagaagacttgaaacactccttctgtggaatttgcaagttgagatttcagccgctttgaggtcaatggtagaataggaaatatcttcctatagaaactagacagaatgattctcagaaactcctttgtgatgtgtgcgttcaactcacagagtttaacctttcttttcatagagcagttaggaaacactctgtttgtaaagtctgcaattggatattcagacctctttgaggccttcgttggaaacgggatttcttcatattatgctagacagaagaattctcagtaacttccttgtgttgtgtgtattcaactcacagagttggactatcctttacacagagcagacttgaaacactctttttgtggaatttgcaagtggagatttctgccgctttgaggtcaatggtagaaaaggaaatatcttcgtataaaaactagagagaatcattctcagaaactgctctgtgatgtgtgcgttcaactctcagagtttaacttttcttttcattcagcagtttggaaacactctgtttgtaaagtctgcacgtggatattttgaccatttagaggccttcgttggaaacgggtttttttcttgtaaggctagacagaagaattcccagtaacttccttgtgttgtgtacattcaactcacagagttgaacgttcccttagacagagcagatttgaaacactctttttgtgcaattggcaagtggtgatttcagctgctttgaggtcaatggtagaaaagggaatatcttcgtataaaaactagacagaatcattcccacaaactgcgttgtgatgtgttcgttcaactcacagagttttacctttctgttcatagagcagttaggaaacactctgtaaagtctgtaagtggatattctgacatcttgtggccttcgctggaaacgggatttcttcatattctgctagacagaagaattctcagtaacttccttgttgttgtgtgtattcaactcacagagttgaacgatcctttacacagagcagacttgtaacactctttttgtggaatttgcaagtggagatttcagccgctttgacgtcaaaggtagaaaaggaaatatcttcctataaaaactagacagaatgattctcagaaacttccttgtgatgtgtgcgttcacctcacagagtttaacctttcttttcatagagcagttaggaaacactctgtaaagtctgcaagtggatattcagacctctttgaggccttcgttggaaacgggtttttttcatataaggctagacagaagaattctcagtaacttccttgtgttgtgtgtattcaactcacagagttgaacgatcctttacacagagcagacttgaaacactctttttgtggagtttgcaagtggagatttcagccgctttgaggtcaatggtagaaaaggaaatatcttcgtataaaaactagacagaatcattctcagaaaatgctctgtgatgtgtgcgttcaactctcagagtttaacttttcttttcattcagcagtttggaaacactctgtttgtaaagtctgcacgtggatattttgaccacttagaggccttcgttggaaacgggtttttttcatgtaagggtagacagaagaattcccagtaacttccttgtgttgtgtgcattcaactcacagagttgaacgttcccttagacagagcagatttgaaacactctatttgtgcaatttgcaagtgtagatttcaagcgctttaaggtcaacggcagaaaaggaaatatcttcgtttcaaaactagacagaatcattcccacaaactgcgttgtgatgtgttcgttcaactcacagagtttaacctttctgttcatagagcagttaggaaacactctgtttgtaaagtctgcaagtagatattgagacctcctagaggccttcgttggaaacgggatttcttcatattctgctagacagaagaattctcagtaccttccttgtgttgtgtgtattcaactcacagagttgaacgatcctttacacacagcagacttgtaacactctttttgtggaatttgcaagtggagatttcagccgctttgaagtcaaaggtagaaaaggaaatatcttcctataaaaactagacagagtgattctcagaaactcctttgtgatgtgtgcgtttaactcacagagtttaacctttcttttcatagagcagataggaaacactctgtttgtaaagtctgcaagtggatattcagacctccttgaggccttcgttggaaacgggatttcttcatattatgctagacagaagaattcccagtaacttccttgtgttgtgtgtgttcaactcacagagttgaactttcatttacacagagcagatttgaaacactctttttgtggaatttgcaggtggagatttcaagcgctttgagaccaaaggcagaaaaggaaatatcttcgtataaaaactagacagaatcattctcagaaactgctctgcgatgtgtgcgttcaactctcagagtttaacttttcttttcattcagcagtttggaaacactcagtttgtaaactctgcaagtggatattcagacctctttgaggccttcgttggaaacgggatttcttcatactatgctagacagaagaattcccagtaacttccttgcgttgtgtacattcaactcacagagttgaacgttcccttagacagagcagatttgaaacactctttttgtgcaattggcaagtggagatttgaagcgctttgaggtcaatggcagaaaaggaattatcttcgtttcaaaactagacagaatgattctcagaaaatcttttgtgatgtgtgcgttcaactcacagagtttaacttttcttctcatagagcagttaggaaacactctgtttgtaaagtctgcaagtggatattcagacctgtttgaggccttcgttggatacgggatttcttcatattatgctagacagaataattctcagtaacttccttgtgttgtgtgtattcaactcacagagttgaaggatcctttacagagagcaggcttgaaacactctttttgtcgaatttgcaagtggagatttcagccgctttgaggtcaatggtagaataggaaatatcttcttatagaaactagacaaaatgattctcagaaacttcattgtgatgtgtgcgttcaactcacagagtttaacctttcttttcatagagcagttaggaaacactctgtttgtaaagtctgcaagtggatattcagacctctttgaggccttcgttggaaacgggtttttttcatgtaaggctagacagaagaattctcagtaacttccttgtgttgtgtgtattcacactgacagagttgaactttcatttagagagagcagttttgaaacactgtttttgtggaatttgcaagtggagatttcaagcgctttggggccaaaggcagaaaaggaaacatcttcgtatgaaaactagacagaaatcattctcagaaaactgctgcgtgatgtgtgcgttcaactctcagagtttaacttttcttttcattcagcggtttggaaacactctgtttgtaaagactgcacgtggatattttgaccacttagaggccttcgttggaaacgggtttttttcatgtaaggctagacagaagaattcccagtaacttccttgtgttgtgtgcattcaactcacagagttgaacgttcccttagacagagcagatttgaaacactctatttgtgcaatttgcaagtgtagatttcaagcgctttaaggtcaatggcagaaaaggaaatatcttcgtttcaaaactagacagaatgattctcagaaactcctttgtgatgtgtgccttcaactcacagagtttaacctttctgttcatagagcagttaggaaacactctgtttgtaaagtctgcaagtggatatccgacctccttgaggccttcgttggaaacgggatttcttcatattctgctagacagaataattctcagtaacttccttgtgttgtgtgtattcaactcacagagttcaacgatcctttacacagagcagacttgaaacactgtttttgtggaatttgcaagtggagatttcagccgctttgaggtcaatggtagaaaaggaaatatcttcctataaaaactagacagaatgattctcagaaactcctttctgatgtgtgcgttcaactcacagagtttaacttttcttttcatagagcagttaggaaacactctgtttgtaaagtctgcaagtggatattcagacctctttgaggccttcgttggaaacgggatttcttcatattatgctagacagaagaattctcagtaacttccttgtgttgtgtgtattcaactcacagagttgaactttcatttacacagagcagatttgaaacactctttttgtggaatttgcaagtggagatttcaagcgctttgaggccaaaggcagaaaaggaaatgtcttcgtttcaaaactagacagaatcattctcagaaactgctctgcgatgtgtgcgttcaactctcagagtttaacttttcttttcattcagcagtttggaaacactctggttgtaaagtctgcacgtggatattttgaccacttagaggccttcgttggaaacgggtttttttcctgtaaggctagacagaagaattcccagtaacttccttgtgttgtgtacattcaactcacagagttgaacgttcccttagacagagcagatttgaaacactctttttgtgcaattggcaaatggagatttcaagcgctttaaggtcaatggcagaaaaggaaatatcttcgtttcaaaactagacagaatgattctcagaaactcctttgtgatgtgtgcgttcaactcacagagtttaacttttcttttcatagagcagttaggaaacactcggtttgtaaagtctgcaagtggatattcagacctctttgaggccttcgttggaaacgggatttcttcatattatgctagacagaagaattctcagtaacttccttgtgttgtgtgtattcaactcacagagttgaacgatgctttacacagagcagacttgaaacattctttttgtggaatttgcaagtggagatttcagccgctttgaggtcaatggtagaataggaaatatcttcctatagaaactagacagaatgattctcataaactcctttgtgatgtgtgcgttgaactcacagagtttaacctttcttttcatggagcagttaggaaacactctgtttataaagtctgcaagtggatattcagacccctttgaggccttcgttggaaacgggatttcttcatattatgctagacagaagaattctcagtaacttccttgtgttgtgtgtattcaactgacagagttgaactttcatttagagagagcagatttgaaacactgtttttgtggaatttgcaaatggagatttcaagcgctttggggccaaaggcagaaaaggaaatgtcttcgtataaaaactagacagaatcattctcagaaactgctgcgtgatgtgtgcgttcaactctcagagtttaacttttcttttcattcagcggtttggaaacactctgtttgtaaagtctgcacgtggatattttgaccacttagaggccttcgttggaaactggttttttgcatgtaaggctagacagaagaattcccagtaacttccttgtgttgtgtgcattcaactcacagagttgaacgttcccttagacagagcagatttgaaacagcctatttgtgcaatttgcaagtgtagatttcaagcgctttaaggtcaacggcagaaaaggaaatatcttcctttcaaaacaagacagaatcattcccacaaactgcgttgtgatgtgttcgttcaactcacagagtttaacctttctgttcatagagcagttaggaaacactctgtttgtaaagtctgtaagtggatattctgacatcttgtggccttcgttggaaacgggatttcttcatattctgctagacagaagaattctcagtaacttccttgtgttgtgtgtattcaactcacagagttgaacgatcctttacacagagcagacttgaaacactcttttcgtggaatttgcaagtggagatttcagccgttttgaggtcaatggtagaaaaggaaatatcttcgtataaagactagacagaatgattctcagaaactcctttgtgatgcgtgcgttcaactcacagagtttaacctttcttttcatagagcagttaggaaacactctgtttgtaaagtctgcaagtggatattcagacctccttgaggccttcgttggaaacgggatttcttcatattatgctagacagaagaattctcagtaacttccttctgttgtgtttattcaactcacagagttgaatgatcctttacacagagcagacttgaaacactctttttgtggaaattgcaagtggagatttcagccgctttgaggtcaatggtagaaaagtaaatatcttcgtataaagactagacataatcattctcagaaactgctgtgtgatgtgtgcgttcaactctcagagtttaacttttcttttcattcagcggtttggaaacactctgtttgtaaagtctgcacgtggaaattttgaccacttagaggccttcgttggaaacgggtttttttcatgtaaggctagacagaagaattcccagtaacttccttgtgttgtgtacattcaactcacagagttgaacgttcccttagacagagcagatttgaaacactctttttgtgcaattggcaagtggagatttcaagcgctttaaggtcaatggcagaaaaggaaatatcttcgtttcaaaactagacagaatcattcccacaaactgcgttgtgatgtgttcgttcaactcacagagtttaacttttcttctcattcagcagtttggaaacactctgtttgtaaagtctgcacgtggataatttgaccacttagaggccttcgttggaaacgggtttttttcatgtaaggctagacagaagaattctcagtaacttcccttgtgttgtgtgtattcaactcacagagttgaacgatcctttacacagagcagacttgaaacactctttttgtggaatttgcaagtggagatttcagccgctttgaggtcaatagtcgaaaaggaaatatcttcgtagaaaaactagacaaaatgattctcagaaactcctttgtgatgtgtgcgttcaactcacagagtttaacctttcttttcatagagcagttaggaaacactctgtttgtaaagtctgcaagtggatattcagacctccttgaggccttcgttggaaacgggatttcttcatgttctgctatacagaagaattctcagtaacttcccttgtgttgtgtgtattcaactgacagagttgaactttcatttagagagagcagatttgaaacactgtttttgtggaatttgcaagtggagatttcaagcgctttgggaccaaaggcagaaaaggaaatatcttcgtataaaaactagacagaatcattctcagaaactgctctgcgatgtgtgcgttcaactctcagagtataacttttcttttcattcagcagtttggaaacactctgtttgtaaagtctgcacgtggataatttgaccacttagaggccttcgttggaaacgggtttttttcatgtaaggctagacagaagaattcccagtaacttccttgttgttgtgtgcattcaactcacagagttgaacgttcccttagacagagcagatttgaaacactctatttgtgcaatttgcaagtgtagatttcaagcgctttaaggtcaatggcagaaaaggaaatttcttcgttttaaaactagacagaattattctcagaaactcctttgtgatgtgtgcgttcaactcacagagttcaacctttcttttcatagagcagttgggaaacactctgtttgaaaagtctgcaagtggatattcagacttctttgaggccttcgttggaagcgggatttcttcatgttctgctagagagaagaattctcagaaacttccttgtgttgtgtgttttcaactcacagagttgaacgatgctttacacagagtagacttgaaacaatctttttgtgtaatttgcaagaggagatttcagccgctttgaggtcaatggtagaaaaggaaatatcttcgtataaaaactagacagaatgattctcagaaactcctttgtgatgtgtgcgttcaactcacagagtttaacctttcttttcatagagcagttaggaaacactctgtttgtaaagtctgcaagtggatattcagacctccttgaggccttcgttggaaacgggatttcttcatattatgctagacagaagaattctcagaaacttccttgtgttgtgtgtattgaactcacagagttgaatgatcctttactcagagcagacttgaaacactccttttgtggaatttgcaagtggagatttcagccgctttgaggtcaatggtagaataggaattatcttcctatagaaactagacagaatcattctcagaaactgctgcgtgatgtgtgcgttcaactctcagagtttaacttttcttttcattcagcggtttggaaacactctgtttgtaaagtctgcacgtggaaattttgaccacttagaggccttcgttggaaacggttttttttcatgtaaggctagacagaagaattcccagtaacttccttgtgttgtgtacattcaactcacagagttgaacgttcccttagacagagcagatttgaaacactctttttgtgcaattggcaaatggagatttcaagcgctttaagttcaatggcagaaaaggaaatatcttcgtttcaaaactagacagaatgattctcagaaactcctttgtgatgtgtgcgttcaactcacagagtttaacctttcttttcgtagagcagttaggaaacactctgtttgtaaagtctgcaagtggatattcagacctctttgaggccttcgttggaaacgggatttcttcatattctgctagacagaagaattctcagaaacttccttgtgttgtgtgcattcaactcacagagttgaacgatccgttacacagtgcagacttgaaacactctttttgtggaatttgcaaggggagatttcagccgctttgaggtcaatggtagtaaaggaaatatcttcgtataaaaactagacagaatgattctcagaatctcctttgtgatgtgtgcgttcaactcacagagtttaacctttcttttcatagagcagttaggaaacactctgtttgtaaagtctgcaagtggatattcagacctctttgaggccttcgttggaaacgggttttttacatataaggctaaacagaagaattcccagtaacttccttgtgttgtgtgtgttcaactcacagagttgaactttgatttacacagagcagatttgaaacactctttttgtggaatttgcaagtggagatttcaagcgctttgaggccaaaggcagaaaaggaaatatcttcgtataaaaacttgtcagaatcattctcagaaactgctctgcaatgtgcgcgttcaactctcagagtttaacttttcttttcattcagcagtttggaaacactctgtttgtaaagtctgcacgtggatattttgaccacttagaggccttcgttggaaacgggtttttttcctgtaaggctagacagaagaattcccagtaacttccttgtgttgtgtacattcaactcacagagttgaacgttcccttacacagagcagatttgaaacactctttttgtgcacttggcaagtggagatttcaagcgctttaaggtcaatggcagaaaaggaaatatcttcgtttcaaaactagacagaatcattctcagaaactgctctgcgatgtgtgcgttcaactctcagagtttaacttttcttttcattcagcagtttggaaacaatctgtttgtaaagtctgcacgtggataatttgaccacttagagaccttcgttggaaacgggtttttttcatgtaaggctagacagaagaattctcagaatcttccttgtgttgtgtgtattcaactcacagagttgaacgatcctttacacagagcagacttgaaacactctttttgtggaatttgcaagtggagatttcagccgctttgaggtccgtgttagaaaaggaaatatcttcgtacaaaaactagacagaatgattctcagaaactcctttgtgatgtgtgcgttcaactcacagagtttaaactttctttacatacagcagttaggaaacactctgtttgtaaagtctgcaagtggatattcagacctctttgaggccttcgttggaaacgggtttttttcatataaggctagacagaagaattcccagtaacttccttgtgttgtgtgtgttcaactcacagagttgaactttcatttacacagagcagatttgaaacactctttttgtggaatttgcaagtggagatttcaagcgctttcaggccaaaggcagaaaaggaaatatcttcgtataaaaactagacagaatcattctcagaaactgctctgcgatgtgtgcgttcaactctcagagtttaacttttcttttcattcagcagtttggaaacactctgtttgtaaagtctgcacgtggataatttgaccacttagagtccttcgttggaaacgggtttttttcatgtaaggctagacagaagaattctcagtaacttccttgtgttgtgtgtattcaactcacagagttgaacgatcctttacacagagcagacttgtaacactctttttgtggaatttgcaagtggagatttcagccgctttgaagtcaaaggtagaaaaggaaatatattcctataaaaactagacagaatgattctcagaaacttcttggtgatgtgtgcgttcaactcacagagtttaacctttcttttcatagagcagttaggaaacagtctgtttgtaaactctgcaagtggatattcagacctctttgaggccttcgttggaaacgggatttcttcatactgtgctacacagaagaattctcagtaacttccttgtgttgtgtgtattcaactcacagagttgaacgatcctttacacagagcagacttgaaacactctttttgtggaatttgcaagtggagatttcagccgcgttgaggtcaatggtagaaaaggaaatatcttcgtataaaaactagacagaatcattctcagaaactcctttgtgatgtgtgtgttcaactcacagagtttaacctttcttttcatagagcagttagtaaacactctgtttataaagtctgcaagtggatattcagacccctttgaggccttcgttggaaacgggatttcttcatattatgctagacagaagaattcccagtaacttccttgtgttgtgtgtgttcaactcacagagttgaactttcatttacacagagcagatttgaaacactctttttgtggaatttgcaagtggagatttcaagccctttgaggccaaaggcagaaaaggaaatatcttcgtataaaaactagacagcatcattctcagaaactgctctgcgatgtgtgcgttcaactctcagagtttaacttttcttttcattcagcagtttggaaacactctgtttgtaaagtctgcacgtggataacttgaccacttagaggccttcgttggaaacgggtttttttcatgtaaggctagacagaagaattcccagtaacttccttgtgttgtgtacattcaactcacagagttgaacgttcccttagacagagcagatttgaaacactctttttgtgcaattggcaaatggagatttcaagcgctttaaggtcaatggcagaaaaggaaatatcttcgtttcaaaactagacagaatcattcccacaaactgcgttgtgatgtgttcgttcaactcacagagtttaacctttcttttcatagaggagttaggaaacagtctgtttgtcaattctgtaagtggatattctgacatcttgtggccttcgttggaaacgggatttcttcatattctgctagacagaagaattcccagtaacttccttgtgttgtgtgtgttcaactcacagagttgaactttcatttacacacagcagatttgaaacactctttttgtggaatttgcaagtggagatttcagccgcgttgaggtcaatggtagaaaaggaaatatcttcgtataaaaactagacagaatgattctgagaaactcctttgtgatgtgagcgttcaactcacacagtttaacctttcttttcatagagcagttaggaaacactctgtttgtaaagtctgcaagtggatattcagacctccttgaggccttcgttggaaacgggatttcttcatattatgctagacagaagaattctcagtaacttccttgtgttgtgtgtattcaactcacagagttgaacgatcctttacacagagcagacttgaaacactccttttgtggaatttgcaattggagatttcagccgctttgaggtcaatggtagaataggaaatatcttcctatagaaactagacagaatgattctcataaactcctttctaatgtgtgcgttcaactcacaaagtttaacttttcttttcatagagcagttaggaaacactctgtttgtaaagtctgcaagtggatattcagacctctttgaggccttcgtaggaaacgggatttcttcatattatgctagacagaagaattcccagtaacttccttgtgttttgtgcattcaactcacagagttgaacgttcccttagacagagcagatttgaaacactctatttgtgcaatttgcaagtgtagatttcaagcgctttaaggtcaatggcagaaaaggaaatatcttcgtttcaaaactagacagaatcattcccacaaactgcgttgtgatgtgttcgttcaactcacagaatttaacctttctgttcatagagcagttaggaaacactctgtttgtaaagtctgtaagtggatattctgacatcttgtggccttcgttggaaacgggatttcttcatattctgctagacagaataattctcagtaacttccttgtgttgtgtgtattcaactcacagagttgaacgatcctttacacagagcagacttgaaacactctttttgtggaatttgcaagtggagatttcagccgctttgaggtcaatggtagaataggaaatatcttcctatagaaactagacagaatgattctcagaaacttctttgtgatgtgtgtgttcaactcacagagtttaacctttcttttcatagagtagttaggaaacactgtgttttcaaactctgcaagtggatattcagacctctttgaggccttcgttggaaacgggtttcttcatactgtgctagacagaagaattcccagtaacttccttgtgttgtgtgtgttcaactcacagagttgaactttcatttacccagagcagatttgaaacactctttttgtggaatttgcaagtggagatttcaagcgctttgaggccaaaggcagaaaaggaaatatcttcgtttcaaaactagacagaatcattctcagaaactgctctgcgatgtgtgcgttcaactctcagagtttaacttttcttttcattcaacagtttggaaacactctgtttgtaaagtctgcacgtggatattttgaccacttagaggccttcgttggaaacgggattttttcctgtaaggctagacagaagaattcccagtaacttccttgtgttgtgtacattcaactcacagagttgaacgttcccttagacagagcagatttgaaacactctttttgtgcaattggcaaatggagatttcaagcgctttaaggtcaatggcagaaaaggaaatatcttcgtttcaaaactagacagaatcattcccacaaactgcgttgtgatgtgttcgttcaactcacagagtttaacctttcttttcatagagcagttaggaaacagtctgtttgtaaattctgtaagtggatattctgacatcttgtggccttcgttggaaacgggatttcttcatattctgctagacagaaaaaattctcagtaacttccttgtgttgtgtgtattcaactcacagagttgatcgatcctttacacagagcatacttgaaacactcttcttgtggaatctgcaagtggagatttcagccgctttgaggtcaatggtagaataggaaatatcttcctatagaaactagacagaatgattctcataaactcctttgtgatgtgtacgttcaactcacagagtttaacatttcttttcatagagcagttaggaaacactctgtttgtaaagtctgcaagtggatattcagtcctccttgaggccttcgttggaaacgggatttcttcatattctgctagacagaagaattctcagtaacttccttgtgttgtgtgtattcaactgacagagttgaactttcatttggagagagcagatttgaaacactgtttttgtggaatttgcaagtggagatttcaagcgctttggggccaaaggcagaaaaggaaatatcttcgtataaaaacgagacagaatcattctcagaaactgctgtgtgatgtgtgcgttcaactctcagagtttaacttttcttttcattcagcggtttggaaacactctgtttgtaaagtctgcacgtggatattttgaccacttagaggccttcgttggaaacgggtttttttcatgtaaggctagacagaagaattcccagtaacttccttgtgttgtgtgcattcaactcacagagttgaacgttcccttagacagagcagatttgaaacactctatttgtgcaatttgcaagtgtagatttcaagcgctttaaggtcaacggcagaaaaggaaatatcttcgtttcaaaactagacagaattattcccacaaactgcgttgtgatgtgttcgttcaactcacagagtttaacctttctgttcatagagcagttaggaaacactctgtttgtaaagtctgtaagtggatattctgacatcttgtggccttcgttggaaacgggatttcttcatattctgctagacagaagaattctcagaatcttccttgtgttgtgtgtattcaactcacagagttgaacgatcctttacacagagcagacttgaaacactctttttgtggaatttgctagtggagatttcagccgctttgaggtccatggtagaaaaggaaatatcttcgtataaaaactagacagaatgattctcagaaactcctttgtgatgtgtgcgttcaactcacagagttcaacctttcttttcatagagcagttgggaaacactctgtttgtaaagtctgcaagtggatattcagacttctttgaggccttcgttggaagcgggatttcttcatgttctgctagacagaagaattctcagaaacttccttgtgttgtgtgttttcaactcacagagttgaacgatcctttacacagagcagacttgaaacactacttttgtggaatttgcaagtggagatttcagccgctttgaggtcaatggtagaataggaaatatcttcctatagaaactagacagaatcattctcagaaaccgctctgtgatgtgtgcgttcaactctcagagtttaacttttcttttcattcagcagtttggaaacactctgtttgtaaagtctgcacgtggatattttgaccacttagaggccttcgttggaaacgggtttttttcatgtaaggctagacagaagaattcccagtaacttccttgtgttgtgtgcattcacctcacagagctgaacgttcccttagacagagcagatttgaaacactctatttgtgcaatttgcaagtgtagatttcaagcgctttaaggtcaatggcagaaaaggaaatatcttcgtttcaaaactagacagaatgattctcataaactcctttgtgatgtgtgcgttcaactcacagagtttaacttttcttttcatagagcagttaggaaacactctgtttgtaaagtctgcaagtggatattcagacctctttgaggccttccttggaaacgggatttcttcatattctgctagacagaagaattctcagtaacttccttgtgttgtgtgtattcaactcacagagttgaacgatcctttacacagagcagacttgaaacattctttttgtggaatttgcaagtggagatttcagccgctttgaggtcaatggtagaataggaaatatcttcctatagaaactagacagaatgattctcagaaactcctttgtgatgtgtgcattcaactcacagagtttaacctttcttttcatagagcagttaggaaacactctgtttgtaaagtctgcaagtggatattcagacatccttgaggctttcgttggaaacgggatttcttcatattctgctagaaagaagaattctcagtaacttcccttgtgttgtgtgtattcaactcacagagttgaacaatcctttacacagagcagacttgaaacactctttttgtggaatttgcaagtggagatttcagccactttgaggtcaatggtagaataggaaatatcttcctatagaaactagacagaatcattctcagaaactgctgcttgatgtgtgcgttcaactctcagaatttaacttttcttttcattcagcggtttggaaacactctgtttgtaaagtctgcacgtggaaattttgaccacttagaggccttcgttggaaacgggtttttttcatgtaaggctagacagaagaattcccagtaacttccttgtgttgtgtgcattcaactcacagagttgaacgttcccttagacagagcagatttgaaacactctatttgtgtaatttacaagtgtagatttcaagcgcattaaggtcaatgacaaaaaggaaatatcttcgtttcaaaactagacagaatcattcccacaaactgcgttgtgatgtgttcgttcaactcacagagtttaacctttctgttcatagagcagttaggaaacactctggttgtaaagtttgccagtggatattcagacctctttgaggtcttcgttggaaacgggatttcttcatattctgctagacagaataattctcagtaacttccttgtgttgtgtgtattcaactcacagagttgaacgatcctttacacagagcagacttgaaacactctttttgtggaatttgtaagtggagatttcagccgctttgaggtcaatggtagaataggaaatatcttcctatagaaactagacagaatgattctcagaaactcctttgtgatgtgtgcgttcaactcacagagtttaacctttcttttcatagagcagttaggaaacactctgtttgtaaagtctgcaagtggatattcagacatccttgaggccttcgctggaaaagggatttcttcatattatgctagacagaagaattcctagtaacttccttgtgttgtgtgtgttcaactcacagagttgaactttcatttacacagagcagatttgaaacactctttttgtggaatttgcaagtggagatttcaagcgctttgagaccaaaggcagaaaaggatatatcttcgtataaaaactagacagaatcattctcagaaaatgctctgcgatgtgtgcgttcaactctcagagtttaacttttcttttcattcagcagtttggaaacaatctgtttgtaaagtctgcacgtggataatttgaccacttagaggccttcgttggaaacgggtttttttcatgtaaggctagacacaagaattctcagtaacttccttgtgttgtgtgtattcaactcacagagttgaacgatcctttacacagagcagacttgaaacactctttttgtggaatttgcaagtggagatttcagccgctttgaggtcaatgctagaataggaaatatcttcctatagaaactagacagaatgattctcagaaagtcctttgtgatgtgtgcgttcaactcacagagtttaacctttcttttcatagagcagttaggaaacactctgtgtgtaaagtctgcaagtggatattcagacctctttgaggccttcgttggaaacgggatttcttcatattatgctagacagaataattctcagtaacttccttgtgttgtgtgtattcaactcacagagttgaacgatcctttacagagagcagacttgaaacactctttttgtggaatttgcaagtggagatttcagccgctttgaggtcaatggtacaataggaaatatcttcctatagaaaatagacagaatgattctcagaaactcctttgtgatgtgtgtgttcaacccacagagtttaacctttcttttcatagagcagttagtaaacactctgtttataaagtctgcaagtggatattcagacccctttgaggccttcgttggaaacgggatttcttcatattatgctagacagaagaattcccagtaacttccttgtgttgtgtgtgttcaactcacagagttgaactttcatttacacagagcagttttgagacactctttttgtggaatttgctaatggagatttcaagcgctttgaggccaaaggcagaaaaggaaatatcttcgtataaaaactagacagaatcattctcagaaactgctctgcgatgtgtgcgttcaactctcagagtttaacttttcttttcattcagcagtttggaaacactctgtttgtaaagtctgcacgtggataatttgaccacttagaggccttcgttggaaacgggtttttttcatgtaaggctagacagaagaattctcagtaacttccttgtgttgtgtgtattcaactgacagagttgaactttcatttagagagagcagatttgaaacactgtttttgtggaatttgcaagtggagatttcaagcgctttaaggtcaacggcagaaaaggaaatatcttcgtttcaaaactagacagaatgattctcagaaactcctttgtgatgtgtgcgttcaagtcacagagttcaacctttcttttcatagagcagttgggaaacactctgtttgtaaagtctgcaagtggatattcagacttctttgaggccttcgttggaagcgggatttcttcatattctgctagacagaagaattctcagtaactgccttgtgttgtgtgtattcaactcacagagttgaacgatgctttacacagagcagacttgaaacactctttttgtggaatttgcaagtggagatttcagccgctttgaggtcaatggtagaataggaaatatcttcctatagaaactagacagaaatgattctcagaaactcctttgtgatgtgtgcgttcaactcacagagtttaacctttcttttcatagagcagttaggaaacactctgtttgtaaagtctgcaagtggatattcagacatccttgaggctttcgttggaaacgggatttcttcatattctgctagaaagagaattcccagtaacttccttgtgttgtgtgtgttcaactcacagagttgaactttcatttacacagagcagatttcaaacactctttttgtggaatttgcaaatggagatttcaagcgctttgaggccaaaggcagaaaaggaaatatcttcgtttcaaaactagacagaatcattctcagaaactgctctgtgatgtgtgcgttcaactctcagagtttaacttttgttttcattcagcagtttggaaacaatctgtttgtaaagtctgcacgtggatattttgaccacttagaggccttcgttgaaaacgggtttctttcatgtaaggggagacagaagaattcccagtaacttccttgcgttgtgtacattcaactcacagagttgaacgttcccttagacagagcagatttgaaacactctttttgtgcaattggcaagtggagatttcaagcgctttaaggtcaatggcagaaaaggaaatatcttcgtttcaaaactagacagaatgattctcagaaacttctttgtgatgtgtgcgttcaactcacagagtttaacctttcttttcatagagcagttaggaaacactctgtttgtaaactctgcaagtggatattcagacctcttggaggccttcgttggaaacgggatttcttcatactatgctagacagaagaattctcagtaacttccttgtgttgtgtgtattcaactcacagagttgaacgatcctttacacagagcagacttgtaacactctttttgtggaatttgcaagtggagatttcagccgctttgaagtcaaaggtagaaaaggaaatatcttcctataaaaactagacagaatgattctcagaaactcctttgtgatgtgtgcgttcaactcacagagtttaacctttcttttcatagagcagttaggaaacactctggttgtaaagactacaagtggatattcagacctctttgaggccttcgttggaaacgggtttttttcctgtaagtctagacagaagaattcccagtaacttccttgtgttgtgtgtgttcaactcacagagttgaactttgatttacacagagcagatttgaaacactctttttgtggagtttgcaagtggagatttcaagcgctttgaggccaaaggcagaaaaggaaatatcttcgtataaaaactagacagaatcattcccacaaactgcgttgtgatgtgtgcgttcaactcacagagtttaacctttcttttcatagagccgtttgtaaacgctctgtttgccaagtctgcaagtggatattctgacatcttgtggacttcgttggaaacgggatttcttcatattctgctagacagaagaattctcagaaacttccttgtgttctgtgtattcaactcacagagttgaacgatcctttacacagagcagatttgacacactctttttgtggaatttgcaagtggagatttcagccgctttgaggtccatggtagaaaaggaaatatcttcgtataaaaactagacagaatgattctcagaaacttctttgtgatgtgtgcgttcaactcacagagtttaacctttcttttcatagagcagttaggaaacactctgtttgtaaatcagcaagtggatattcagacctctttgaggccttcgttggaaacggaatttcttcatattatgctagacagaggaattctcagtaacctccttgtgttgtgtgtactcaactcacagagttgaacgatcctttacacagagcagactagaatcactctttttgtggaatttgcaagtggagatttcagccgctttgaggtcaatggtagaaaaggaaatatcttcgtataaaaactagacagaatgattcccagaaactcctttgtgatgtgtacgttcaactcacagagtttaacctttcttttcatagagcagttaggaaacactctgtttgtaaactctgcaagcggatattcagaccgctttgaggccttcgttggaaacgggatttcttaatattatgctagacaaaagaattcccagtaacttccttgtgttgtgtgtgttcaactcacagagttgaactttcatttacacagagcagatttgaaacactctttttatggaatttgcaaatggaggtttcaagcgctttgaggccaaaggcagaaaaggaaatatcttcgtataaaaactagacagaatcattctcagaaactgctgcgtgatgtgtgcgttcaactcacagagtttaacttttcttttcattcagcggtttggaaacactctgtttgtaaagtctgcacgtggatattttgaccacttagaggccttcgttggaaacgagattttttcatgtaaggctagacagaagaattcccagtaacttccttgtgttgtgtgcattcaactcacagagttgaacgttcccttagacagagcagatttgaaacactctatttgtgcaacttgcaagtgtagatttcaagcgctttaacctcaatggcagaaaaggaaatatcttcgtttcaaaactagacagaatcattcccacaaactgctttgtgatgtgttcgttcaactcacagagtttaacctttcttttcatagagcagttaggaaacagtctgtttgtcaattctgtaagtggatattctgacatcttgtggccttcgttggaaacgggatttcttcatattctgctagacagaagaattcttagaaacttccttgtgttgtgtgttttcaactcacagagttgaacgatcctttacacagagcagacttgaaacactctttttgtggaatttgcaagtggagatttcagccgctttgaggtcaatggtagaataggaaatatcttcctatagaaagtagacagaatgattctcagaaactcctttgtgatgtgtgcgttcaactcacagagtttaacctttcttttcatagagcagttaggaaacactctgtttgtaaagtctgcaagtggatattcagacctccttgaggccttctttggaaacgggatttcttcctattatgctagacagaagaattctcagtaacttccttgtgttgtgtgtattcaactcacagagttgaacgatcctttacacagagcagacttgaaacactctttttgtggaatttgcaagtggagatttcagccgctttgaggtcaatggtagaataggaaatatcttcctgtagaaactagacagaatcattctcagaaactgctctgcgatgtgtgcgttcagctctcagagtttaacttttcttttcattcagcagtttggaaacactctgtttgtaaagtctgcacgtgcataatttgaccacttagaggccttcgttggaaacgggtttttttcatgtaaggctagacagaagaattcccagtaacttccttgtgttgtgtacattcaactcacagagttgaacgttcccttagacagagcagatttgaaatactctttttatgcaattggcaagtggagatttcaagcgctttaaggtcaatggcagaaaaggaaatatcttcgtttcaaaactagacagaatcattcccacaaactgcgttgtgaagtgctcgttcaactcatagagtttaacctttctgttcatagagcagttaggaaacactctgtttgaaaagtctgtaagtggatattctgacatcttgtggccttcgttggaaacgggatttcttcatattctgctagaaagaagaattctcagtaacttccttgtgttgtgtgtattcaactcacagagttgaacgatcctttacacagagcagacttgaaacactctttttgtggaatttgcaagtggagatttcagccgctttgaggtcaatggtagaataggaaatatcttcctatagaaactagacagaatgattctcagaaactcctttgtgatgtgtgcgttcaactcacagagtttaacctttcttttcatagagcagttaggaaacactctgtttgtacagtctgcaagtggatattcagacctccttgaggccttcgttggaaacgggtttttttcatataaggctagacagaagaattcccagtaacttccttgtgttgtgtgtgttcaactcacagagttgaactttcatttacacagagcagatttgaaacactctttttgtggaatttgcaagtggagatttcaagcgctttgaggccaaaggcagaaaaggaaatatcttcgtttcaaaactagacagaatcattctcagaaactgctctgcgatgtgtgccttcagctctcagagtttaacttttcttttcattcagcagtttggaaacactctgtttgtaaagtctgcacgtggatattttgaccacttagaggtcttcgttggaaacgggtttttgtcatgtaaggctagacagaagaattcccagtaacttccttgtgttgtgtgcattcaactcacagagttgaactttcccttagacggagcagatttgaaacactctatttgtgcaatttgcaagtgtagatttcaagcgctttaaggtcaatggcagaaaaggaaatatcttcgtttcaaaactagagagaatcattcccacaaactgcgttgtgatgtgttcgttcaactcacagagtttaacctttctgttcatagagcagttaggaaacactctgtttgtaaagtctgtaagtggatattctgacatcttgtggccttcgttggaaacgggatttcttcgtattctgctagacagaagaattctcagtaacttccttgtgttgtgtgtattcaactcacagagttgaacgatcctttacacagagcagacttgaaacactctttttgtgtaatttgcaagtggagatttcagccgctttgaggtcaatggtagaaaaggaaactatcttcatataaagactagacagaatgattctcagaaaatcttttgtgatgtgtgcgttcaactcacagagtttaacttttcttctcatagagcagttaggaaacactctgtttgtaaagtctgcaagtggatattcagacctctttgaggccttcgttggaaacgggatttcttcatattatgctagacagaagaattcccagtaacttccttgtgttgtgtgtgttcaactcacagagttgaactttcatttacacagagcagattggaaacactctttttgtggaatttgcaagtggagatttcaagcgctttgaggacaaaggcagaaaaggatatatcttcgtataaaaattagacagaaatcattctcagaaactgctctgcgatgtgtgcgttcaactctcagagtttaacttttcttttcattcagcagtgtggaaaaactctgtttgtaaagtctgcacgtggatattctgaccacttagaggccttcgttggaaacgggtttttttcctgtaaggctagacagaagaattcccagtaacttccttgtgttgtgtacattcaactcacagagttgaacgttcccttagacagaacagatttgaaacactctttttgtgcaattggcaagtggtgatttcagccgctttgaggtcaatggtagaaaaggaaatatcttcgtataaaaactagacagaatgattctcagaaactcctttgtgatgtgtgcgttcaactcacagagttttacctttcttttcatagagcagttaggaaacactctgtttgtaaagtctgcaagtggatattcagacctctttgaggccttcgttggaaacgggatttcttcatattatgctagacggaaggattctcagtaacttccttgtgttgtgtgtattcaactcacagagttgaacgatcctttacacagagcagacttgaaacactctttttgtggaatttgcaagtggagatttcagcctctttgaggtcaatggtagaaaaggagatatcttcgtataaaaactagacagaatgattctcagaaactcctttgtgatgtgtgcgttcaactcacagagtttaacctttcttttcatagagcagttaggaaacactctgtttgtaaagtctgcaagtggatattcagacctctttgaggccttcgttggaaacgggatttcttcatattatgctagacagaagaatttcccagtaacttccttgtgttgtgtgtgttcaactcacagagttgaactttcatttacacagagcagatttgaaacactctttttgtggaatttgcaagtggagatttcaagcgctttgaggccaaaggcagaaaaggaaatatcttcgtttcaaaactagacagaatcattctcagaaactgctctgcgatgtgtgcgtccaactctcagagtttaacttttcttttcattcagcagtttgcaaacactctgtttgtaaagtctgcacgtggatattttgaccacttagaggccttcgttggaaacgggtttttttcatgtaaggctagacagaagatttcccagtaacttccttgtgttgtgtacattcaactcacagagttgaacgttcccttaggcagagcagatttgaaacactctttttgtgcaattggcaaatggagatttcaagcgctttaaggtcaatggcagaaaaggaaatatcttcgtttcaaaactagacagaatcattcccacaaactgcgttgtgatgtgttcgttcaactcacagagtttaacctttctgttcatagagcagttaggaaacactctgtttgtaaagtctgtaagtggatattctgacatcttgtggccttcgttggaaacgggatttcttcatattctgctagacagaagaattctcagtaacttccttgtgttgtgtgtattcaactcacagagttgaacgatcctttacacagagcagacttgaaacactctttttgtggaatttgcaattggagatttcagccgctttgaggtcaatggtagaaaaggaaactatcttcatataaagattagacagaatgattctcagaaactcctttgtgatgtgtgagttcaactcacagagtttaacctttcttttcatagagcagttaggaaacactctgtttttaaagtctgcaagtggatattcagacctctttgaggccttcgttggaaacgggtttttttcatataaggctagagagaagaattctcagtaacttccttgtgttgtgtgtattcaactgacagagttgaactttcatttagacagagcagatttgaaacactatttatgtggaattggcaattggagatttcaacctctttgaggccaaaggcagaaaaggaaatatcttcgtttcaaaactagacagaatcattctcagaaactgctctgcgatgtgtgcgttcaactctcagagtttaacttttcttttcattcagcattttggaaacactctgtttgtaaagtctgcacgtggataatttgaccacttagaggccttcgttggaaacgggtttttttcatgtaaggctagacagaagaattcccagtaacttccttgtgttgtgtacattcaactcacagagttgaacgttcccttagacagagcagatttgaaacactctttttgtgcaattggcaagtggagatttcaagcgctttaaggtcaatggcagaaaaggaaatatcttcgtttcaaaactagacagaatcattcccacaaactgcgttgtgctgtgttcgttcaactcacagagattaacctttcttttcatagagcattaggaaacagtctgtttgtaaattctgtaagtggatattctgacatcttgtggccttcgttggaaacgggatttcttcatattctgctagacagaagaattctcagtaacttccttgtgttgtgtgtattcaactcacggagttgaacgatcctttacacagagcagacttgaaacactctttttgtggaatttgcaagtggagatttcagccgctttgaggtcaatggtagaataggaaatatcttcctatagaaactagacagaatgattctcagaaactcctttgtgatgtgtgcgttcaactcacagagtttaactttccttttcatagagcagttaggaaacactctgtttgtaaagtctgcaagtggatattcagacctctttgaggccttctttggaaacgggatttcttcatattctgatatacagaagaattcccagtaacttccttgtgttgtgtgtgttcaactcacagagttgaactttcatttacacagagcaggtttgaaacactctttttgtggtatttgcaaatggagatttcaagcgctttgtggccaaatgcagaaaaggaaatatcttcgtataaaaactagacagaatgattctcagaaaatcctttgtgatgtgtgcgttcaactcacagagtttaacttttcttttcatagagcaattaggaaacactctgtttgtaaagtctgcaagtggatattcagacctctttgaggccttcgttggaaacgggatttcttcatattatgctagacagaagaattctcagtaacttccttgtgttgtgtgcattcaactcacagagttgaacgttcccttagacagagcagatttgaaacactctatttgtgcaatttgcaagtgtagatttcaagcgcattaaggtcaaaggcagaaaaggaaatatcttcgtttcaaaactagacagaatcattcccacaaactgcgttgtgatgtgttcgttcaactcacagagtttaacctttcttttcatagagcagttaggaaacagtctgtttgtcaattctgtaagtggatattctgacatcttgtggccttcgttggaaacgggatttcttcatattctgctagacagaagaattctcagtaacttccttgtgttgtgtgtattcaactcacagagttgaacgatcctttacacagggcagacttgaaacactctttttgtggaatttgcaagtggagatttcagccgcgttgaggtcaatggtagaaaaggaaatatcttcgtataaaaactagacagaatgattctcagaaactcctttgtgatgtgtgcgttcaactcacagagttcaacctttcttttcatagagcagttgggaaacactctgtttgtaaagtctgcaagtggatattcagacttctttgaggccttcgttggaagcgggatttcttcatattctgctagacagaagaattctcagtaacttccttgtgttgtgtgtattcaactcacagagttgaacgatcctttacacagagcagacttgaaacactctttttgtggaatttgcaaggggagatttcagccgctttgaggtcaatggtagaataggaaatatcttcctatagaaactagacagaatcattctcagaaactgctctgcgatgtgtgcgttcaactctcagagtttaacttttcttttcattcagcagtttggaaacactctgtttgtaaagtctgcacgtggataatttgaccacttagaggccttcgttggaaacgggtttttttcatgtaaggctagacagaagaattcccagtaacttccctgtgttgtgtacattcaactcacagagttgaacgttcccttagacagagcagatttgaaacactctttttgtgcaattggcaagcggagatttcaagcgctttaaggtcaatggcagaaaaggaaatatcttcgtttcaaaactagacagaatcattatcaaaaactgcgttgtgatgtgttcgttcaactcacagagtttaacctttcttttcatagagcagttgggaaacagtctgtttgtaaattctgtaagtggatattctgacatcttgtggccttcgttggaaacgggatttcttcatattctgctagacagaagaattctcagtaacttccttgtgttgtgtgtattcaactcacagagttgaacgatcctttacacagagcagacttgaaacactctttttgtggaatttgcaagtggagatttcagccgctttgaggtcaatggtagaaaaggaaatatcttcgtataaaaactagacagaatgattctcagaaaatcttttgtgatgtgtgcgttcaactcacagagtttaacttttcttctcatagagcagttaggaaacactctgtttgtaaagtctgccagtggatattcagacctctttgaggtcttcgttggaaacgggatttcttcatattatgctagacagaagaattcccagtaacttccttgtgttgtgtgtgttgaactcacagagttgaactttcatttacacagagcagatttgaaacactctttttgtggaatttgcaagtggagatttcaagcgctttcaggccaaaggcagaaaaggaaatatcttcgtataaaaactagacagaatcattctcagaaactgctctgcgatgtgtgcgttcaactctcagagtttaacttttcttttcattcagcagtttggaaacactctgtttgtaaagtctgcacgtggataatttgaccacttagaggccttcgttggaaacgggtttttttcatgtaaggctagacagaagaattcccagtaacttccttgtgttgtgtacattcaactcacagagttgaacgttcccttagacagagcagatttgaaacactctttttgtgcaattggcaagtggagatttcaagcgctttaaggtcaatggcagaaaaggaaatatctgcgtttcaaaactagagagaacgattctcagaaactcctttgtgatgtgtgcgttcaactcacagcagtttaacctttctgttcatagagcagttaggaaacactctgtttgtaaaatctgcaagtggatattcagacctctttgaggccttcgttggaaacgggatttcttcatattctgctagacagaagaattctcagtaacttccttgtgttgtgtgtattcaactcacagagttgaacgatcctttacacagagcagacttgaaacactctttttgtggaatttgcaagtggagatttcagccgctttgaggtcaatagtcgaaaaggaaatatcttcgtagaaaaactagacagaatgattctcagaaacttctttgtgatgtgtgcgttcaactcacagagtttaacctttcttttcatagagcagttaggaaacactctgtttgtaaactctgcaagtggatattcagacctctttgaggccttcgttggaaacgggatttcttcatactatgctagacagaagaattctcagtaacttccttgtgttgtgtgtattcaactgacagagttgaactttcatttagacagaggagatttgaaacactctttttgtggaatttgcaagtggagatttcaagcgctttgaggccaaaggcagaaaaggaaatatcttcgtataaaaactagacagaatcattctcagaaactgctgcgtgatgtgtgcgttcaactctcagagtttaacttttcttttcattcagcggtttggaaacactctgtttgtaaagtctgcacgtggatattttgaccacttagaggccttcgttggaaacgggtttttttcatgaaggctagacagaaagaattcccagtaacttccttgtgttgtgtgcattcaactcacagagttgaacgttcccttaggcagagcagatttgaaacactctatttgtgcaatttgcaagtgtagatttcaagcgctttaaggtcaatggcagaaaaggaaatatcttcgtttcaaaactagacagatgattctcagaaacttcattgtgacgtgtgcgttcaactcacagagtttaacctttcttttcatagagcagttaggaaacactctgtttgtaaagtctacaagtggatattcagacctctttgaggccttcgttggaaacgggatttcttcatactgtgctagacagaagaattctcagtaacttccttgtgttgtgtgtattcaactcacagtagttgaacgatcctttacacagagcggacttgaaacacactttttgtggaatttgcaagtggagatttcagccgcgttgaggtcaatggtagaaaaggaaatatcttcgtataaaaactagacagaatgattctcagaaactcctttgtgatgtgtgtgttcaactcacagagtttaacctttcttttcatagagcagttaggaaacactctgtttgtaaagactgcaagtggatattcaggcctctttgaggccttcgttggaaacgggttttttcatataaggctagacagaagaattcccagtaacttccttgtgttgtgtgtgttcaactcacagagttgaactttcatttacacagagcagattggaaacactctttttgtggaatttgccagtggagatttcaagcgcattgaggccaaaggcagaaaaggaaatatcttcgtataaaaactagacagaatcattctcagaaactgctctgtgatgtgtgcgttcaactctcagagtttaacttttcttttcattcagcagtttggaaaccctctgtttgtaaagtctgcacgtggatattttgaccacttagaggccttcgttggaaacgggtttctttcctttaaggctagacagaagaattcccagtaacttccttgcgttgtgtacattcaactcacagagttgaacggttcccttagacagagcagatttgaaacactctttttgtgcaattggcaagtggagatttcaagcgctttaaggtcaatggcagaaaaggaaatatcttcgtttcaaaactagacagaatcattctcacaaactgcgttgtgatgtgttcgttcaactcacagagtttaacctttctgttcatagagcagttaggaaacactctgtttgtaaagtctgtaagtggatattctgacatcttgtggctttcgttggaaacgggatttcttcatattctgctagacagaataattctcagtaacttccttgtgttgtgtgtattcaactcacagagttgaacgatcctttacacagagcagacttgaaacactctttttgtggaatttgcaagtggagatttcagccgctttgaggtcaatagtagaaaaggaaatatcttcgtagaaaaactagacagaatgattctcataactcttttgtgatgtgtgcgttcaactcacagagttcaacctttcttttcatagagcagttgggaaacactctgtttgtaaagtctgcaagtggatattcagacttctttgaggccttcgttggaagcgggatttcttcatattctgctagacagaagaattctcagtaatttccttgtgttgtgtgtattcagctgacagagttgaactttcatttagagagagcagatttgaaacactgtttttgtggaatttgcaagtggatatttcaagcgatttgaggccaaaagcagaaaaggaaatatcttcgtataaaaactagacagaatcattctcagaaactgctctgcgatgtgtgcgttcaactctcagagtttaacttttcttttcattcagcagtttggaaacactctgtttgtaaagtctgcacgtggataatttgaccacttagaggccttcgttggaaacgggtttttttcatgtaaggctagacagaagaattctcagtaacttccttgtgttgtgtgtattcaactcacagagttgaacgatcctttacacagagcagacttgaaacactctttttgtggaatttgcaagtggagatttcagccgctttgaggtcaatggtagaaaaggaaatatcttcgtgtagaaacaagacagaatgattctcagaaactcctttgtgatgtgtgcgttcaactcacagagtttaacctttcttttcatagagcagttaggaaacactctgtttgtaaagtctgcaagtggatattcagacctctttgaggccttcgttggaaacggcatttcttcacattatgctagacagtttaattctcaataacttccttgtgttgtgtgtattcaactcacagagttgaacgatcctttacagagagcagacttgaaacactctttttgtggaatttgcaagtggagatttcagccgctttgaggtcagtggtagaataggaaatatcttcctatagaaactagacagaatgattctcagaaactcctttgtgatgtgtgcgttcaactcacagagtttaacctttcttttcatagagcagttaggaaacactctgtttgtaaagtctgcaagtggatattcagacctctttgaggccttcgttggaaacgggatttcttcatattctgctagacagaagaattctcagtaacttccttgtgttgtgtgtattcaactcttagagttgaacgatcctttacagagagcagacttgaaacactctttttgtggaatttgcaagtggagatttcagccgctttgaggtcaatggtagaataggaaatatcttcctatagaaactagacagaatcattctcagaaactgctgcgtgatgtgtgcgttcaactctcagagtttaacttttcttttcattcagcggtttggaaacactctgtttgtaaagtctgcacgtggatattttgaccacttagaggccttcgttggaaacgggtttttttcatgtaaggctagacagaagaattcccagtaacttccttgtgttgtgtgcattcaactcacagagttgaacgttcccttagacagagcagatttgaaacactctatttgtgcaatttgcaagtgtagatttcaagcgctttaaggtcaatggcagaaaaggaaatatcttcgtttcaaaactagacagtatcattcccacaaactgcgttgtgatgtgttcgttcaactcacagagtttaacctttctgttcatagagcagttaggaaacactctgtaaagtctgtaagtggatattctgacatcttgtggccttcgttgtaaacgggatttcttcatattctgctagacagaagaattctcagtaacttccttgtgttgtgtgtattcaactcacagagttgaacgatcctttacacagagcagacttgaaacactctttttgtggaatttgcaagtggagatttcagcctctttgaggtcaatggtagaataggaaatatcttcctatggaaactagacagaatgattctcagaaactcctttgtgatgtgtgcgttcaactcacagagtttaacctttcttttcatagagcagttgggaaacactctgtttgtaaagtctgcaagtggatattccgacatccttgaggctttcgttggaaacgggatttcttcatattctgctagaaagaagaattctcagtaacttccttgtgttgtgtgtattcaactcacagagttgaacgatcctttatacagagcagacttgaaacactctttttgtggaatttgcaagtggagatttcagccgctttgaggtcaatggtagaataggaaatatcttcctatagaaactagacagaacgattctcagaaactcctttgtgatgtgagcgttcaactcacagagtttaacctttcttttcatagagcagttaggaaacactctgtttgtaaagtctgcaagtggatattcagacctctttgaggccttcgttggaaacgggatttcttcatattctgctacacagaagaattcccagtaacttccttgtgttgtgtgcattccactcacagagttgaacgttcccttagacagagcagatttgaaacactctatttgtgcaatttgcaagtgtagatttcaagctctttaaggtcaatggcagaaaaggaaatatcttcgtttcaaaactagacagaatcattcccacaaactgcgttgcgatgtgttcgttcaactcacagagtttaacatttcttttcatagagcacttaggaaacagtctgtttgtaaattctgtaagtggatattctgacatcttgtggccttcgttggaaacaggatttcttcatattctgctagacagaagaattctcagtaacttccgggtgttgtgtgtattcaactcacagagttgaacgatcctttacacagagcagacttgaaacactctttttgtggaatttgcaagtggagatttcagccgctttgaggtcaatggtagaaaaggaaataccttcctataaaaactagacagaatgattctcataaactcctttgtgatgtgtgcgttcaactcacagagtttaacttttcttttcatagagcagttaggaaacactctgtttgtaaagtctgcaagtggatattcagacctccttgaggccttcgttggaaacgggatttcttcatattctgctagacagaagaattctcagtaacttccttgagttgtgtgtattcaactcacagagttgaacgatcctttacacagagcagacttgaaacattctttttgtggaatttgcaagtggagatttcagccgctttgaggtcaatggtagaataggaaatatcttcctatagaaactagacagaatcattctcagaaactgctgcgtgatgtgttcgttcaactctcagagtttaacttttcttttcattcagcggtttggaaacactctgtttgtaaagtctgcacgtggaaattttgaccacttagaggccttcgttggaaacgggtttttttcatgtaaggctagacagaagaattcccagtaacttccttgtgttgtgtgcattcaactcacagagttgaacgttcccttagacagagcagatttgaaacactctatttgtgcaatttgcaagtgtagatttcaagcgctttaaggtcaacggcagaaaaggaaatatcttcgtttcaaaactagacagaatgattctcagaaactcctttgtgatgtgtgcgttcaactcacagagtttaacctttcttttcatagagcctttaggaaacactctgtttgtaaagtctgcaagtggatattcagacctccctgaggccttcgtcggaaatgggatttcttcatattctgctagacagaagaattctcactaacttccttgtgttgtgtgtgttcaactcacagagttgaacgatcctttacacagagcagacttgaaacactctttttgtggaatttgcaagtggagatttcagccgctttgaggtcaatggtagaataggaaatatcttcctatagaaaatagacagaatgattctcagaaactcctttgtgatgtgggcgttcaactcacagagtttaacctttcttttcatagagcagttaggaaacactctgtttgtaaagtctgcacgtggatatttggacttctttgaggccttcgttggaaacgggtttttttcatgtaaggctagacggaagaattcccagtaacttctttgtgttgtgtgtgttcaactcacagagttgaactttgatttacacagagcagatttgaaacactctttttgtggaatttgcaagtggagatttcaagcgatttgaggccaaaggcagaaaaggaaatatcttcgtataaaaactagacagaatcattctcagaaactgctgcgtgatgtgtgcgttcaagtctcagagtttaacttttgttttcattcagcggtttggaaacactctgtttgtaaagtctgcacgtggaaattttgaccacttagaggccttcgttggaaacgggtttttttcatgtaaggctcgacagaagaattcccagtaacttccttgtgttgtgtacattcaactcacagagttgaacgttcccttagacagagcagatttgaaacactctttttgtgcaattggcaagtggagatttcaagcgctttgaggtcaatggcagaaaaggaaatatcttcgtttcaaaactagacagaatcattcccacaaactgcgttgtgatgtgttcgttcaactcacagagtttaacctttcttttcatagaccagttaggaaacagtctgtttgtcaattctgtaagtggatattctgacatcttgtggccttcgttggaaacgggatttcttcatattctgctagacagaagaattctcagtaacttccttgtgttgtgtgtattcaactcacagagttgaaggatcctttacagagagcaggcttgaaacactctttttgtcgaatttgcaagtggagatttcagccgctttgaggtcaatggtagaataggaaatatcttcctatagaaactagacagaatgattctcagaaactcctttgtgatgtgtgcgttcaactcacagagtttaacctttcttttcatagagcagttaggaaacactctgtttgtaaagtctgcaagtggatattcagacctctttgaggccttcgttggaatcgggtttttttcatataaggctagacagaagaattcccagtaacttccttgtgttgtgtgtgttcaactcacagagttgaactttcatttacacagagcagatttgaaacactctttttgaggaatttgcaagtggagatgtcaagcgctttgaggccaaaggcagaaaaggaaatatcttcgtataaaaactagacagaatgattgtcagaaactcctttgtgatgggtgtgttcaatttaaagagtttaacttttcttttcataaagcagttaggaaacactctgtttgtaaagtctgcaagtggatattttgacctatttgaggccttcgttggaaacgggtttttttcctgtaaggctagatagaagaattcccagtaacttccttgtgttgtgtacattcaactcacagtgttgaacgttcccttagacagagcagatttgaaacactctttttgtgcaattggcaagtggagatttcaagcgctttaaggtcaatggcagaaaaggaaatatcttcatttcaaaactagacagaatcattcccacaaactgcgttgtgatgtgttcgttcaactcacagggtttaacctttcttttcacagagcagttaggaaacactctgtttgtaaagtctgcacgtggatattttgacctctttgaggccttcgttggaaacgggttttttcatataaggctagacagaagaattctcagaatcttccttgtgttgtgtgtattcaactcacagagttgaacgatcctttacacagagcagacttgtaacactctttttgtggaatttgcaagtggagatttcagccgctttgaggtcaatggtagaaaaggaaatctcttcgtataaaaactagacagaatgattctcagaaactcctttgtgatgtgtgcgttcaactcacagagttcaacctttcttttcatagagcagttggaaaacactctgtttgtaaagtctgcaagtggatattcaaactttctttgaggccttcgttggaagcgggatatcttcatattctgctagacagaagaattcccagtaacttccttgtgttgtgtgtgttcaactcacagagttgaactttgatttacacagagcagatttgaaacactctttttgtggaatttgcaagtggagatttcaagcgctttgaggccaaaggcagaaaaggaaatatcttcgtataaaaagtagacagaatcattctcagaaactgctctgcgatgtgtgcgttcaactctcagagtttaacttttcttttcattcagcagtttggaaacactctgtttgtaaagtctgcacgtggatattttgaccacttagaggccttcgttggaaacgggtttttttcctgtaaggctagacagaagaattcccagtaacttccttgtgttgtgtgcattcaactcacagagttgaacgttcccttagacagagcagatttgaaacactctatttctgcaatttgcaagtgtagttttcaagctctttaaggtcaacggcagaaaaggaaatatcttcgtttcaaaactagacagaatcattcccacaaactgcgttgtgatgtgttcgttcaactcacagagtttaacctttctgttcatagagcagttaggaaacactctgtttctaaagtctgtaagtggatattctgacatcttgtggccttcgttggaaacgggatttcttcatattctgctagacagaagaattctcagtaactttccttgtgttgtgtgttttcaactcacagagttcaaccatcctttacacagagtagacttgaaacactctttttgtggaattggcagggtggagatttcagccgctttgaggtcaatggtagaaaagtaaatatcttcgtataaaaactagacagaatgattctcagaaactcctttgtgatgtgtgcgttcaactcacagagtttaacctttcttttcatagagcagttaggaaacactctgcttgtaaagtctgcatgtggatattcagccctctttgaggccttcgttggaaacgggtttttttcatataaggctagacagaagaattcccagtaacttccttgtgttgtgtgtgttcaactcacagagttgaactttcatttacacagagcagatttgaaacactctttttgtggaatttgcaagtggagatttcaagcgctttgaggccaaaggcagaaaaggaaatatcttcgtataaaaactagacagaatcattctcagaaactgctgcgtgatgtgtgcgttcaactctcagcagtttaacttttcttttcattcagcggtttggaaacactctgtttgtaaagtctgcacgtggatattttgaccacttagagaccttcgttggaaacgggtttttttcatgtaaggctagacagaagaattcccagtaacttccttgtgttgtgtacattcaactcacagagttgaacgttcccttagacagagcagatttgaaacactctttttgtgcaattggcaagtggagatttcaagcgctttaaggtcaattgcagaaaaggaaatatcttcgtttcaaaactagacagaatgattctcagaaactcctttgtgatgtgtgcgttcaactcacagagtttaacctttcttttcatagatcagttaggaaacactctgtttgtaaagtctgcaagtgaatattcagacctctttgaggtcttcgttggaaacgggatttcttcatattctgctagacagaagaattctcagtaacttccttgtgttgtgtgtattcaactcacagagttgaacgatcctttacacagagcagacttgaaacactctttttgtggaatttgcaagtggagatttcagccgctttgaggtcaatggtagaaaaggaaactatcttcatataaagactagacagaatgattctcagaaaatcttttgtgatgtgtgcgttcaactcacagagtttaactattcttctcatagagcagttaggaaacactctgtttgtaaagtctgcaagtggatattcagacctctttgaggccttcgttggaaacgggatttcttcatattatgctagacagaagaattctcagtaacttccttgtgttgtgtgtattcaactcacagagttgaactttcatttacacagagcagatttgaaacactctttttgaggaatttgcaaatggagaattcaagcgttttgaggccaaaggcagaaaaggaaatatcttcgtataaaaactagacagaatcattctcagaaactgctctgcgatgtgtgcattcaactctcagagtttaatttttcttttcattcagcagtttggaaacactctctttgtaaagtctgcacgtggatattttgaccacttagaggccttcgttggaaacgggttttattcctgtaagtctagacagaagaattcccagtaacttccttgtgttgtgtacattcaactcacagagttgaacgttcccttagacagagcagatttgaaacactctttttgtgcaattggcaagtggagatttcaagcgctttaaggtcaatggcagaaaaggaaatatcttcgtttcaaaactagacagaatgattctcagaaactcctttgtgatgtgtgcgttcaactcacagagtttaacctttcttttcatagagcagttgggaaacactctgtttgtaaagtctgcaagtggatattcagacctctttgacgccttcgttggaaacgggatttcttcatattctgctagacagaagaattctcagtaactttccttgtgttgtgtgtattcaactcacagagttgaacgatcctttacacagagcagacttgaaacactctttttgcggaatttgcaagtggagatttcagccgctttgaggtcaatggtagaataggaaatatcttcctatagaaactagacagagtgattctcagaaactcctttgtgatgtctgcgttcaactcacagagtttaacctttcttttcatagagcagttaggaaacactctgtttgtaaagtctgcaagtggatattcagacctccttgaggccttcgttggaaacgggatttcttcatattctgctatacagaggaattctcagtaacttccttgtgttgtgtgtattcaactgacagagttaaactttcatttagagagagcagatttgaaacactgtttttgtggaatttgcaagtggagatttcaagcgctttggggccaaaggcagaaaaggaaatatcttcgtataaaaactagacagaatcattctcagaaactgctctgcgatgtgtgcgttcaactctcagagtttaacttttcttttcattcagcagtttggaaacactctgtttgtaacgtctgcacgtgaataatttgaccacttagaggccttcgttggaaacgggtttttttcatgtaaggctagacagaagaattctcagtaacttccttgtgttgtgtgtattcaactcacagagttgaacgatcctttacacagagcagacttgtaacacgctttttgtggaatttgcaagtggagatttcagccgctttgaagtcaaatgtagaaaaggaaatatcttcctataaaaactagacagaatcattcccacaaactgcgttgtgatgtgttcgttcaactcacagagtttaacctttcttttcatagagcagttaggaaacagtctgtttgtcaattctgtaagtggatattctgacatcttgtggccttcgttggaaacgggatttcttcatattctgctagacagaagaattctcagtaacttccgcgtgttgtgtgtattcaactcacagagttgaacgatcctttacacagagcagacttgtaacactctatttggggaatttgcaagtggagatttcagccgctttgaagtcaaaggtagaaaaggaaatatcttcctataaaaactagacagaatgattctcagaaactcctttgtgatgtgtgcgttcaactcacagagtttaacctttcttttcatagagcagttaggaaacactctgtttgtaaagtctgcaaatggatattcagacctctctgaggccttcgttggaaacgggctttttcatataaggctagacagaagaattctcagtaacttccttgtgttgtgtgtattcaactgacagagttgaactttcatttagagagagcagatttgaaacactgtttttgtggaatttgcaagtggagatttcaagcgctttggggccaagggcagaaaaggaaatatcttcgtataaaaacaagacagaatcattctcagaaactgctgcgtgatgtgtgcgttcaactctcagagtttaacttttcttttcattcagcggtttggaaacactctgtttgtaaagtctgcacgtggacattttgaccacttagagtccttcgttggaaacgggtttttttcatgtaaggctagacagaagaattcccagaaacttccttgtgttgtgtgcattcaactcacagagttgaacgttcccttagacagagcagatttgaaacactctatttgtgcaatttgcaagtgtagatttcaagcgctttaaggtcaatggcagaaaaggaaatatcttcgtttcaaaactagacagaatcattcccacaaactgcgttgtgatgtgttcgttcaactcacagagtttaacctttcttttcatagagcagttaggaaacagtctgtttgtcaattctgtaagtggatattctgacatcttgtggccttcgttggaaacgggatttcttcatattctgctagacagaataattctcagtaacttccttgtgttgtgtgtattcaactcacagagttgaacgatcctttacatagagcagacttgaaacactctttttgtggaatttgcaagtggagatttcagccgctttgaggtcaatagtagaaaaggaaatatcttcgtagaaaaactagacagaatgattctcagaaactcctttgtgatgtgtgcgttcaactcacagtagtttaacttttcttttcatagagcagttaggaaacactctgtttgtaaagtctgcaagtggatattcagacctctttgaggccttcgttggaaacgggatttcttcatattatgctagacagaagaattcccagtaacttccttgtgttgtgtgtgttcaactcacagagttgaactttcatttacacagagcagatttgaaacactctttttgtggaatttgcaagtggagatttcaagcgctttgaggccaaaggcagaaaaggaaatatcttcgtataaaaactagacagaatcattttcagaaactgctctgcgatgtgtgcgttcaactctcagagtttgacttttcttttcattcagcagtttggaaacactctgtttgtaaagtctgcacgtggataatttgaccacttagaggccttcgtgggaaacgggtttttttcatgtaaggctagacagaagaattcccagtaacttccttgtgttgtgtgcattcaactcacagagttgaacgttcccttagacagagcagatttgaaacactctatttgtgcaatttgcaagtgtagatttcaagcgctttaaggtcaacggcagaaaaggaaatatcttcgtttcaaaactagacagaatcattcccacgaactacgttgtgatgtgttcgttcaactcacagagtttaacctttcttttcatagagcagttaggaaacagtctgtttgtaaattctgtaagtggatattctgacatcttgtggccttcgttggaaacgggatttcttcatattctgctagacagaagaattctcagtaacttccttgtgttgtgtgtattcaactcacagagttgaacgatcctttacacagagcagacttgaaacactctttgtgtggaatttgcaagtggagatttcagccgctttgagttcaatggtagaataggaaatatcttcctatagaaactagacagaatgattctcagaaactcctttgtgatgtgtgcgttcaactcacagagtttaacctttcttttcatagagcagttaggaaacactctgtttgtaaagtctgcaagtggatattcagacctccttgaggccttctttggaaacgggatttcttcatattatgctagacagaagaattctcagtaacttccttgtgttgtgtgtattcaactcacagagttgaacgatcctttacacagagcatacttgaaacactcttcttgtggaatttgcaagtggagatttcagccgctttgaggtcaactgtagaataggaaatatcttcctatagaaactagacagaaatgattctcagaaactcttttgtgatgtgtgcgttcaactcacagagtttaacctttctgttcatagagcagttaggaaacactctgtttgtaaagtctgcaagtggatattcagacctccttggggccttcgttggaaacgggatttcttcatattctgctagacagaagaattcccagtaacttccttgtgttgtgtacattcaactcacagagttgaacgttcccttagacagagcagatttgaaacactctttttgtgcaattggcaaatggagatttcaagcgctttaaggtcaatggcagaaaaggaaatatcttcgtttcaaaactagacagaatcattcccacaaactgcgttgtgatgtgttcgttcaactcacagagtttaacctttcttttcatagagcagttaggaaacagtctgtttgaaaattctgtaagtggatattctgacatcttgtggccttcgttggaaacgggatttcttcatattctgctagacagaagaattctcagtaccttccttgtgttgtgtgtattcaactcacagagttgaacgatcctttacacagagcagacttgaaacactctttttgtgaaatttgcaactggagatttaagccgctttgtggtcaatggtataataggaaatatcttcctatagaaactagacagaatgattctgagaaactcctttgtgatgtgtgcgttcaactcacagagtttaacctttcttttcatagagcagttaggaaacactctgtttgtaaagtctgcaagtggatattcagacctccttgaggccttcgttggaaacgggatttcttcatattatgctagacagaagaattctcagtaacttccttgtgttttgtgtattcaactcacagagttgaacgatcctttacacagagcagacttgaaacactctttttgtggaatttgcaagtggagatttcagccgctttgagttcaatggtagaataggaaatatcttcctatggaaactagacagaatcattctcagaaactgctgcgtgatgtgtgcgttcaactctcagagtttaacttttctttgcattcagcggtttggaaacactctgtttgtaaagtctgcacgtggatattttgaccacttagaggccttcgttggaaacgggtttttttcatgtaaggctagacagaagaattcccagtaacttccttgtgttgtgtgcattcaactcacagagttgaacgttcccttagacagagcagatttgaaacactctatttgtgcaatttgcaagtgtagatttcaagcgcattaaggtcaatggcagaaaaggaaatatcttcgtttcaaaattagacagaatcattcccacaaactgcgttgtgatgtgttcgttcaactcacagagtttaacctttctgttcatagagcagttaggaaacactctgtttgtaaagtctgtaagtagatattctgacatcttgtggccttcgttggaaacgggatttcttcatattctgctagacagaagaattctcagtaacttccttgtgttgtgtgtattcaactcacagagttgaacgatcctttacacagagcagacttgaaacactctttttgtggaatttgcaagtggagatttcagccgctttgaggtcaatggtagaaaaggaaactatcttcatataaagattagacagaatgattctcagaaactcctttgtgatgtgtgcgttcaactcacagagtttaacctttcttttcatagagcagttgggaaacactctgtttgtaaagtctgcaagtggatattcagacatccttgaggctttcgttggaaacgggatttcttcatattctgctagaaagaagaattctcagtaacttccttgtgttgtgtgtattcaactcacagagttgaacgatcctttacacagagcagacttgaaacactcttcttgcggaatttgcaagtggagatttcagccgctttgaggtcaatggtagaataggaaatatcttcctatagaaactagacagaatcattctcagaaactgctctgcgatgtgtgcgttcaactctcagagtttaacttttcttttcattcagcagtttggaaacactctgtttgtaaagtctgcacgtggatattttgaccacttagaggccttcgttggaaatgggtttttttcctgtaaggctagacagaagaattctcagcaacttccttgtgttgtgtgtattcaactcacagagttgaacgatcctttgagcagacttgagaaactctttttgtggaatttgcaagtggagatttcagccggtttgaggtcaatggtagaaaaggaaatatcttcgaataaaaactagacagaatgattctcagaaactcctttatgatgtgtgcgttcaactctcagagtttaaccttccttttcataaagcagttaggaaacactctgtttgtaaagtctgcaagtggataatcagacctctttgaggccttcgttggaaacgggattttttcatattctgctagacagaagaattctcagtaacttcctcgtgttgtgtgtattcaactcacagagttgaacgatcctttacacagagcagacttgaaacactctttttgtggaatttgcaaatggagatttcagccgctttgaggtcagtggttgaaaaggaaatatcttcatataaaaattagacagaatgattctcagaaacttctttgtgatgtgtgcgttcaactcacagagtttaacctttcttttcatagagcagttatgaaacactctgtttgtaaactctgcaagtggatattcagacctctttgaggccttcgttggaaacgggatttcttcatactgtgctagacagaagaattcccagtaacttccttgtgatgtgtgtgttcaactcacagagttcaactttcatttacacagagcagatttgaaacactctttttgtggaatttgcaagtggagatttcaagcgctttgaggccaaaggcagaaaaggaaatatcttcgtataaaaactacacagaatgattctcagaaactcctttgtgatgtgtgcgttcaactcacagagtttaacctttcttttcatagagcagttaggaaacactctgtttgtaaagtctgcaagtgatattcagacctctttgaggccttcgttggaaacgggtttttttcatataaggctagacagaagaattcccagtaacttccttgtgttgtgtacattcaactcacagagttgaaccgttcccttagacagagcagatttgaaacactctttttgtgcaattggcaagtggagatttcaagcgctttgaggtcaatggcagaaaaggaaatatcttcgtttcaaaactagacagaatgattctcagaaacttctttgtgatgtgtgcgttcaactcacacagtttaacctttcttttcatagagcagttaggaaacactctgtttgtaaactctgcaagtggatattcagacctctttgaggccttcgttggaaacgggatttctccatactgtgctagacagaagaattctcagtaacttccttgtgttgtgtgtattcaactcacagagttgaacgatcctttacacagagcggacttgaaacactcgttttgtggaatttgcaagtggagatttcagccgcgttgaggtcaatggtagaaaaggaaatatcttcgtataaaaactagacagaatgattctgaaaactcctttgtgatgtgtgcgttcaactcacacagtttaacctttcttttcatagagcagttaggaaacactctgtttgtaaagtctgcaagtggatattcagacctccttgaggccttcgttggaaacgggatttcttcatattatgctagacagaagaattctcagtaacttccttgtgttgtgtgtattaaactgacagagttgaactttcatttagagagagcagatttgaaacactgtttttgtggaatttgcaagtggagatttcaagcgctttggggccaaaggcagaaaaggaaatatcttcgtataaaaactagacagaatcattctcagaaactgctctgcgatgtgtgcgttcaactctcagagtttaacttttcttttcattcagcagtttggaaacattctgtttgtaaagtctgcacgtggatattttgaccacttagaggccttcgttggaaacgggtttttttcctgtaaggctagacagaagaattcccagtaacttccttgtgttgtgtacattcaactcacagagttgaacgttcccttagacagaacagatttgaaacactctttttgtgcaattggcaaatggagatttcaagcgctttgagatcaatggtagaaaaggaaatatcttcgtttcaaaactagacagaatcattcccacaaactgcgttgtgatgtgttcgttcaacctacagtgtttaacctttcttttcatagagcagttaggaaacagtctgtttgtaaattctgtaagtggatattctgacatcttgtggccttggttggaaacgggatttcttcatattctgctagacagaagaattctcagaatcttccttgtgttgtgtgtattcaactcacagagttgaacgatggtttacacagagcagatttgaaacactctttttgtggaatttgcaagtggagatttcagccgctttgaggtcaatggtagaaaaggaaatatcttcgtataaaaactagacagaatgattctcagaaacttcattgtgttgtgtgcgttcaactcacagagtttaacctttcttttcatagagcagttaggaaacactctgtttgtaaactctgcaagtggatattcagagctctttgaggccttcgttggaaacgggatttcttcatactgtgctagacagaagaattcccagtaacttccttgtgttgtgtgtgttcaactcacagagttgaactttgatttacacagagcagatttgaaacactctttttgtggaatttgcaagtggagatttcaagcgctttgaggccaaaggcagaaaaggaaatatcttcgtataaaaactagacagaatcattctcagacactgctctgcgatgtgtgcgttcaactctcagagtttaacttttcttttcattcagcagtttggaaacactctgtttgtaaagtctgcacgtggatattttgaccacttagaggccttcgttggaaacgggtttttttcctgtaaggctagacagaagaattcccagtaacttccttgtgttgtgtacattcaactcacagagttgaacgttcccttagacagagcagatttgaaacactctttttgtgcaattggcaaatggagatttcaagcgctttaaggtcaatggcagaaaaggaaatatcttcgtttcaaaactagacagaacgattctcagaaattcctttgtgatgtgtgcgttcaactcacagagtttaacctttcttttcatagagcagttaggaaacactctgtttgaaaagtctgcaagtggatattcagacctctttgaggccttcgttggaaacgggatttcttcatattctgctagacagaagaattctcagtaacttccttgtgttgtgtgtattcaactcacagagttgaacgatcgtttacacagagcagacttgaaacactctttttgtggaatttgcaagtggagatttcagccgctttgaggtcaatagtagaaaaggaaatatcttcggagaaaaactagacagaatgattctcagaaactcctttgtgatgtgtgtgttcaactcacagagtttaacctttcttttcatagagcagttaggaaacactctgtttgtaaagtctgcaagtggatattcagacctctttgaggccttcgttggaaacgggtttttttcatataaggctagacagaagaattcccagtaacttccttgtgttgtgtgtgttcaactcacagagttgaactttcatttacacagagcagatttgaaacactctttttgtggaatttgcaagtggagatttcaagcgctttgaggccaaaggcagaaaaggaaatatacttcgtataaaaactagacagaatcattctcagaaactgctctgcgatgtgtgcgttcaactctcagaagtttaacttttcttttcattcagcagtttggaaacactctgtttgtaaagtctgcacgtggataacttgaccacttagaggccttcgttggaaacgggtttttttcatgtaaggctagacagaagaattcccagtaacttccttgcgttgtgtacattcaactcacagagttgaacgttcccttagacagagcagatttgaaacactctttttgtgcaattggcaagtggagatttcaagcgctttaaggtcaatggcagaaaaggaaatatcttcgtttcaaaactagacagaatgattctcagaaactcctttgtgatgtgtgcgttcaactcacagagtttaacttttcttttcatagagcagtaaggaaacactctgtttgtaaagtctgcaagtggatattcagacctctttgaggccttcgttggaaacgggatttcttcatattatgctagacagaataattctcagtaacttccttgtgttgtgtgtattcaactcacagagttgaacgatcctttacagagagcagacttgaaacactctttttgtggaatttgcaagtggagatttcagccgctttgaggtcaatggtagaaaaggaaatatcttcgtataaagactagacagaatgattctcagaaactcctttgtgatgtgtgcgttcaactcacagagtttaacctttcttttcatagagcagttaggaaacactctgtttgtaaagtctgcaagtggatattcagacctccttgaggtcttcgttggaaacgggatttcttcatattctgctagacagaagaattctcagtaacttccttgtgttgtgtgtattcaactgacagagttgaactttcatttacagagagcagatttgaaacactgtttttgtggaatttgcaagtggagatttcaagcgctttggggccaaaggcagaaaaggaaatatcttcgtgtaaaaactagacagaatcattctcagaaactgctgcgtgatgtgtgctttcaactctcagagtttaacttttcttttcattcagcggtttggaaacactctgtttgtaaagtctgcacgtggatattttgaccacttagaggcctacgttggaaacgggtttttttcatgtaaggctagacagaagaattcccagtaacttccttgtgttgtgtgcattcaactcacagagttgaacgttcccttagacagagcagatttgaaacactctatttgtgcaatttgcaagtgtagatttcaagcgctttaaggtcaatggcagaaaaggaaatatcttcgtttcaaaactagacagaatcattcccacaaactgcgttgtgatatgttcgttcaactcacagagtttaacctttctgttcatagagcagttaggaaacactctgtttgtaaagtctgtaagtggatattctgacatcttgtggccttcgttggaaacgggatttcttcatattctgctagacagaagaattctcagtaacttccttgtgttgtgtgtattcaactcacagagttgaacgatcctttacacagagcggacttgaaacactctttttgtgaaatttgcaagtggagatttcagccgcgttgaggtcaatggtagaaaaggaaatatcttcgtataaaaactagacagaatgattctcataaactcctttgtgatgtgtgcgttcaactcacagagtttaacctttcttttcatagagcagttaggagacactctgtttgtaaagtctgcaagtggatattcagacctctttgaggccttcgttggaaaagggatttcttcatattatgctagacagaagaattctcagtaacttccttgtgttgtgtgtattcaactgacagagttgaactttcatttagagagagcagatttgaaacactgtttttgtggaatttgcaagtggagatttcaagcgctttggggccaaaggcagaaaaggaaatatcttcgtataaaaactagacagaatcattctcagaaaccgctctgtgatgtgtgcgttcaagtctcagagtttaacttttcttttcattcagcagtttggaaacactctgtttgtaaagtctgcacgtggatattttgacaacttagaggccttcgttggaaacgggttttttttcacgtaaggctagacagaagaattcccagtaacttccttgtgttgtgtacattcaactcacagagttgaacgttcccttagacagagcagatttgaaacactctttttgtgcaattggcaaatggagatttcaagcgctttaaggtcaatggcagaaaaggaaatatcttcgtttcaaaactagacagaatcattcccacaaactgcgttgtgatgtgttcggtcaactcacagagtttaacctttcttttcatagagcagttaggaaacagtctgtttgtaaattctgtaagtggatattctgacatcttgtggccttcgttggaaacgggatttcttcatattctgctagacagaagaattctcagtaacttccttgtgttgtgtgtattcaactcacagagttgaacgatcctttacactgagcagacttgaaacactctttttgtggaatttgcaagtggagatttcagccgctttgaggtcaatggtagaaaaggaaatatcttcgtataaagactagacagaatgattctcagaaactcctttgtgatgtgtgcgttcaactcacagagtttaacttttcttttcatagagcagttaggaaacactctgtttgtaaagtctgcaagtggatattcagacctctttgaggccttcgttggaaacgggatttcttcatattatgctagacagaataattctcagtaacttccttgtgttgtgtgtattccactcacagagttgaacgatcctttacggagagcagacttgaaacactctttttgtggaatttgcaagtggagatttcagccgctttgaggtcaatggtagaataggaaatatcttcctatggaaactagacagaatcattctcagaaactgctctgcgatgtgtgcgttcaactctcagagtttaacttttcttttcattcagcagtttggaaacactctgtttgtaaagtctgcacgtggatattttgaccacttagaggccttcgttggaaacgggtttttttcctgtaaggctagacagaagaattcccagtaacttccttgtgttgggtgcattcaactcacagagttgaacgttcccttagacagagcagatttgaaacactctatttgtgcaatttgcaagtgtagatttcaagcgctttaaggtcaatggcagaaaaggaaatatcttcgtttcaaaactagacagaatcgttcccacaaactgcgttgtgatgtgttcgttcaactcacagagtttaacctttctgttcatagagcagttaggaaacactctgtttgtaaagtctgtaagtggatattctgacatcttgtggccttcgttggaaacgggatttcttcatattctgctagacagaagaattctcagtaacttccttgtgttgtgtgtattcaactcacagagttgaatgatcctttacacagaacagtcttgaaacactctttttgtggaatttgcaagtggagatttcagccgctttgaggtcaatggtagaataggaaatatcttcctatagaaaatagacagaatgattctcagaaactcctttgtgatgtgtgcgttcaactcacacagtttaacctttcttttcatagagcagttaggaaacactctgtttgtaaagtctgcaagtggatattcagacctctttgaggccttcgttggaaacgggattttttcatattatgctagacagaagaattctcagtaacttccttgtgttgtgtgtattcaactgacagagttgaactttcatttagaccgagcagatttgaaacactctttttgtggaatttgcaagtggagatttcaagcgctttgaggccaaaggcagaaaaggaaatatcttcgtataaaaactagacagaatcattctcagaaactgctgcgtgatgtgtgcgttcaactctcagagtttaacttttcttttcattcagcggtttggaaacactctgtttgtaaagtctgcacgtggacattttgaccccttagaggccttcgttggaaacgggtttttttcatgtaaggctagacagaagaattcccagtaacttccttgtgttgtgtgcattcaactcacagagttgaacgttcccttagacagagcagatttgaaacactctatttgtgcaatttgcaagtgtagatttcaagcgctttaaggtcaacggcagaaaaggaaatatcttcgtttcaaaactagacagaatgattctcagaaactcctttgtgatgtgtgcgttcaactcacagagtttaacctttcttttcatagagtagttaggaaacactctgtttgtgaagtctgccagtggatattcagacctctttgaggccttcgttggaaacggggtttcttcatattatgctagacagaagaattctcaataacttccttgtgttgtgtgcattcaactcacagagttgaatgatcctttacacagagcagattagaaacactctttttgtggaatttgcaagtggagatttcagccgctttgaggtcaatggtagaaaaggaaatatcttcgtataaaaactagacagaatgattctcagaaactcctttgtgatgtgtgcgttcaactcacagagtttaacctttcttttcatagagcagttaggaaacactctgtttgtaaagtctgcaagtggatattcagacctcttagaggccttcgttggaaacgggatttcttcatactctagacagaagaattcccagtaacttccttgtgttgtgtgtgttcaactcacagagttgaactttcatttacacagaggagatttgaaacactctttttgtggaatttgcaaatggagatttcaagcgctttgaggccaaaggcagaaaaggaaatatcttcgtataaaaactagacagaatcattctcagaaactgctctgcgatgtgtgcgttcaactctcagagtttaacttttcttttcattcagcagtttggaaacactctgtttgtaaagtctgcacgtggatattttgaccacttagaggccttcgttggaaacgggtttttttcctgtaaggctagacagaagaattcccagtaacttccttgtgttgtgtgcattcaactcacagagttgaacgttcccttagacagagcagatttgaaacactctatttgtgcaatttgcaagtgtagttttcaagctctttaaggtcaacggcagaaaaggaaatatcttggtttcaaaactagacagaatcattcccacaaactgcgttgtgatgtgttcattcaactcacagagcttaacctttctgttcatagagcagttaggaaacactctgtttgtaaagtctgtaagtggatattctgacatcttgtggccttcgttggaaacgggatttcttcatattctgctagacagaagaattctcattaacttccttgtgttgtgtgtattcaactcacagagttgaacgatcctttacacagagcagacttgaaacattctttttgtggaatttgcaagtggagatttcagccgctttgaggtcaatggtagaataggaaatatcttcctatagaaactagacagaatgattctcagaaaatcttttgtgatgtgtgcgttcaactcacagagtttaacttttcttctcatagagcagttaggaaacactctgtttataaagtctgcaagtggatattcagacctctttgaggccttcgttggaaacgggatttcttcatattctgctagacagaagaattcccagtaacttccttgtgttgtgtgtgttcaactcacagagttgaactttgatttacagagcagatttgaaacactctttttgtggaatgtgcaagtggagatttcaagcgctgtgaggccaaaggcagaaaaggatatatcttcgtataaaaactagacagaatcattctcagaaactgctctgcgatgtgtgcgttcaactctcagagtttaacttttcttttcattcagcagtttggaaacactctgtttgtaaagtctgcacgtggatattttgaccacttagaggccttcgttggaaacgggtttttttcctgtaaggctagacagaagaattcccagtaacttccttgtgttgtgtgcattcaactcacagagttgaacgttcccttagacagagcagatttgaaacactctatttgtgcaatttgcaagtgtagatttcaagcgctttaaggtgaatggcagaaaaggaaatatcttcgtttcaaaactagacagaatgattctcagaaactcctttgtgatgtgtgcgttcaactcacagagtttaacctttcttttcatagagcagttaggaaacactctgtttgtaaagtctggaagtggatattcagacatccttgaggctttcgttggaaacgggatttcttcatattctgctagaaagaagaattctcagtaacttccttgtgttgtgtgtattcaactcacagagttgaacgatcctttacacagagcagacttgaaacactctttttgtggaatttgcaagtggagatttcagccgctttgagttcaatggtagaataggaaatatcttcctatagaaactagacagaatgattctcataaactcctttgtgatgtgtgcgttcaactcacagagtttaacctttcttttcatagagcagttaggaaacactctgtttgtaaagtctgcaagtggatattcagacctctttgaggccttcgttggaaacgggatttcttcatattatgctagacagaagaattctcagtaacttccttgtgttgtgtgtattcaactgacagagttgaagtttcattaagagagagcagatttgaaacactgtttttgtggaatttgcaagtggagatttcaagcgctttggggccaaaggcagaaaaggaaatatcttcgtataaaaactagacagaatcattctcagaaactgctgcgtgatgtgtgcgttcaactctcagagtttaacttttccttttcattcagcggtttggaaacactctgtttgtaaagtctgcacgtggatattttgaccacttagaggccttcgttggaaacgggtttttttcatgtaaggctagacagaagaattcccagtaacttccttgtgttgtgtacattcaactcacagagttgaacgttcccttagacagagcagatttgaaacactctttttgtgcaattggcaaatggagatttcaagcgctttaagttcaatggcagaaaaggaaatatcttcgtttcaaaactagacagaatcattcccacaaactgcgttgtgatgtgttcgttcaactcacagagtttaacctttcttttcatagagcacttaggaaacagtctgtttgtaaattctgtaagtggatattctgacatcttgtggccttcgttggaaacgggatttcttcatattctgctagacagaataattctcagtaacttccttgtgttctgtgtattcaacttacagagttgaacgatcctttacagagagcagacttgaaacactctttttgtggaatttgcaagtggagatttcagccgctttgaggtcaatggtagaaaaggaaatatcttcgtataaagactagacagaatgattctcagaaactcctttgtgatgtgtgcgttcaactcacagagttcaacttttcttttcatagagcagttaggaaacactctgtttgtaaagtctgcaagtggatattcagacctctttgaggccttcgttggaaacgggatttcttcatattctgcaagacagaagaattctcagtaacttccttgtgttctgtgtattcaactcacagagttgaacgatcctttacacagagcagacttgaaacactctttttgtggaatttgcaagtggagatttcagccgctttgaggtcaatggtagaaaaggaaatatcttcgtataaagactagacagaatcattctcagaaactgctctgcgatgtgtgcgttcaactctcagagtttaacttttcttttcattcagcagtttggaaacactctgtttgtacagtctgcacgtggataatttgaccacttagaggccttcgttggaaacgggtttttttcatgtaaggctagacagaagaattctcagtaacttccttgtgttgtgtgtattcaactcacagagttgaacgatcctttacacagagcagacttgtaacactctttttgtggaatttgcaagtggagatttcagccgctttgaagtcaaatgtagaaaaggaaatatcttcctataaacactagacagaatcattcccacaaactgcgttgtgatgtgttcgttcaactcacagagtttaacctttcttttcatagagcagttaggaaacagtctgtttgtcaattctgtaagtggatattctgacatcttgtggccttcgttggaaacgggatttcttcatattctgctagacagaagaattctcagaaacttccttgtgttgtgtgtattcaactcacagagttgaacgatcgtttacacagagcagacttgagacactctttttgtggaatttgcaagtggagatttcagccgctttgaggtcaatggtagaaaaggaaatatcttcatataaaaactagacagaatgattctcagaatcttctttgtgatgtgtgcgttcaactcacagagtttaacctttcttttcatagagcagttaggaaacactctgtttgtaaattctgcaagtggatattcagacctcattgaggccttcgttggaaacgggatttcttcatactatgctagacagaagaattctcagtaacttccttgtgttgtgtgtattcaactgacagagttgaactttcatttagagagagcagatttgaaacactgtttttgtggaatttgcaagtggagatttcaagcgctttggggccaaaggcagaaaaggaaatatcttcgtataaaaactagacagaatcattctcagaaactgctctgcgatgtgtgcgttcaactctcagagtttaacttttcttttcattcagcagtttggaaacactctgtttgtaaagtctgcacgtgtatattttgaccacttagaggccttcgttggaaacgggtttttttcctgtaaggctagacagaagaattcccagtaacttccttgtgttgtgtacattcaactcacagagttgaacgttcccttagacagagcagatttgaaacactctttttgtgcaattggcaaatggagatttcaagcgctttaaggtcaatggcagaaatggaaatatcttcgtttcaaaactagacagaatcattcccacaaactgcgtagtgatgtgttcgttcaactcacagagtttaacctttcttttcatagagcagttaggaaacagtctgtttgtcaattctgtaagtggatattctgacatcttgtggccttcgttggaaacgggatttcttcatattctgctagacagaagaattcccagtaacttccttttgttgtgtacattcaactcacagagttgaacgttcccttagacagagcagacttgtaacactctttttgtggaatttgcaagtggagatttcagccgctttgaagtcaaaggtagaaaaggaaatatcttcctataaaaactagacagaatgattctcagaaactcctttgtgatgtgtgcgttcaactcacagagtttaacctttcttttcatagagcagttaggaaacactctgtttgtaaagtctgcaagtggatattcagacctctttgaggccttcgttggaaacgggtttttttcatataaggctagacagaagaattcccagtaacttccttgtgttgtgtgtgttcaactcacagagttgaactttcatttacccagaacagatttgaaacactctttttgtggaatttgcaagtggagatttcaagcactttgaggccaaaggcagaaaaggaaatatcttcgtttcaaaactagacagaatcattctcagaaactgctgcgtgatgtgtgcgttcaactctcagagtttaacttttcttttcattcagtggtttggaaacactctgtttgtaaagtctgcacgtggatattttgaccacttagaggccttcgttggaaacgggtttttttcatgtaaggctagacagaagaattcccagtaacttccttgtgttgtgtacattcaactcacagagttgaacgttcccttagacagagcagatttgaaacactctttttgtgcaattggcaagtggagatttcaagcgctttaaggtcaatggcagaaaaggaaatatcttcgtttcaaaactagacagaatgattctcagaaactcctttgtgatgtgtgcgttcaactcacagagttcaacctttcttttcatagagcagttgggaaacactctgtttgtaaagtctgtaagtggatattcagacttctttgaggccttcgttggaagcggggtttcttcatattctgctagacagaagaattctcagaaacttccttgtgttgtgtgttttcaactcacagagttgaacgatcctttacacagagcagacttgaaacactccttttgtggaatttgcaagtggagatttcagccgctttgaggtcaatggtagaataggaaatatcttcctatagaaagtagacagaatgattctcagaaactcctttgtgatgtgtgcgttcaactcacagagttcaacctttcttttcatagaacagttgggaaacactctgtttgtaaagtctgcaagtggatattcagacatccttgaggctttcgttggaaacgggatttcttcatattctgctagaaagaagaattctcagtaacttccttgtgttgtgtgtattcaactgacagagttgaactttcatttagagagagcagatttgaaacactgtttttgtggtatttgcaagtggagatttcaagcgctttggggccaaaggcagaaaaggaaatatcttcgtataaaactagacagaatcattctcagaaactgctctgcgatgtgtgcgttcagctctcagagtttaacttttcttttcattcagcagtttggaaacactctgtttgtaaagtctgcacgtggatattttgaccacttagaggccttcgatggaaatgggtttttgtcatgtaaggctagacagaagaattcccagtaacttccttgtgttgtgtacattcaactcacagagttgaacgttcccttagacagagcagatttgaaacactctttttgtgcaattggcaagtggagatttcaagcgcttaaggtcaatggcagaaaaggaaatatcttcgtttcaaaactagacagaatcattcccacaaactccgttgtgatgtgttcgttcaactcacagagtttaacctttcttttcatagagcagttaggaaacagtctgtttgtcaattctgtaagtggatattctgacatcttgtggccttcgttggaaacgggatttcttcacattctgctagacagaagaattctcagaaacttccttgtgttgtgtgttttcaagtcacagagttgaacgatcctttacacagagcagacttgaaacactctttttgtggaatttgccagtggagatttcagccgctttgaggtcaatggtagaaaaggaaatatcttcgtataaaaagtagacagaatgattctcagaaactcctttgtgatgtgggcgttcaactcacagagtttaacctttcttttcatagagcagttaggaaacactctgtttgtaaagtctccacgaggatacttggacttctttgaggccttcgttggaaacgggtttttttcatgtaaggctggacagaagaattctcagtaacttccttgtgttgtgtgtattcaactgacagagttgaactttcatttagagagagcagatttcaaacactgtttttttggaatttgcaagtggagatttcaagcgctttggggtcaaaggcagaaaaggaaatatcttcgtataaaaactagacagaatcattctcagaaaccgctctgtgatgtgtgcgttcaactctcagagtttaacttttcttttcattcagcagtttggaaacactctgtttgtaaagtctccacgtggatattttgaccacttagaagccttcgtttgaaacgggtttttttttcatgtaaggctagacagaagaattcccagtaacttccttgtgttgtgtacattcaactcacagagttgaacgttaccttagacagagcagatttgaaacactctttttgtgcaattggcaaatggagatttcaagcgctttaaggtcaatggcagaaaaggaaatatcttcgtttcaaaactagacagaatgattctcagaaactcctctgtgatgtgtgcgttcaactctcagagtttaacttttcttttcattcagcagtttggaaacactctgtttgtaaagtctgcacgtggatattttgaccacttagaggccttcgttggaaaagggatttcttcatatgatgctagacagaagaattctcagtaacttccttgtgttgtgtgtattcaactcacagagttgaacggatcctttacacagagcagacttgaaacactctttttgtggaatttgcaagtggagatttcagccgctttgaggtcaatggtagaataggaaatatcttcctatagaaactagacagaatgattctcagaaactcctttgtgatgtgtgtgttcaactcacagagtttaacctttcttttcatagagcagttaggaaacgctctgtttgtaaagtctgcaagtggatattcagacctcgttgagaccttcgttggaaacgggatttcttcatattctgctagacagaagaatcctcagtaacttccttgtgttgtgtttattcaactcacagagttgaatgatcctttacacagagcagacttgaaacactctttttgtggaatttgcaagtggagatttcagccgctttgtggtcaatggtagaaaaggaaatatcttcgtataaagactggacagaaatgattctcagaaacttctttgtgatgtgtgcgttcaactcacagagtttaacctttcttttcatagagcagttaggaaacactctgtttgtaaactctgcaagtcgatattcagacctctttgaggccttcgttggaaacgggatttcttcatactatgctagacagaagaattcccagtaacttccttgtgttgtgtgcattcaactcacagagttgaacgttcccttagacagagcagatttgaaacactctatttgtgcaatttgcaattgtagttttcaagctctttaaggtcaacggcagaaaaggaaatatcttcgtttcaaaactagacagaatgattctcataaactcctttgtgatgtgtgcgttcaactcacagagtttaacctttcttttcattgagcagttaggaaacactctgtttgtaaagtctgcaagtggatattcagacctccttgaggccttcattggaaacgggatttcttcatattctgctagacagaagaattctcagtaacttccttgtgttgtgtgtattcaactcacagagttgaacgatcctttacacagagcagacttgaaacactctttttgtggaatttgcaattggagatttcagccgctttgaggtcaatagtagaaaaggtaatatcttcgtagaaaaactagacagaatgattctcagaaactcctttgtgatgtgtgtgttcaactcacagagtttaacctttcttttcatagagcagttagtaaacactctgtttataaagtctgcaagtggatattcagacccctttgaggccttcgttggaaacgggatttcttcatattatgctagacagaagaattcccagtaacttccttgtgttgtgtgtgttcaactcacagagttgaactttcatttacacagagcagatttgaaacactctttttgtggaatttacaaatggaggtttcaagcgctttgaggccaaaggcagaaaaggaaatatcttcgtataaaaactagacagaatcattctcagaaactgctctgcgatgtgtgcgttcaactctcagagtttaacttttcttttcattcagcagtttggaaacactctgtttgtaaagtctgcacgtggataacttgaccacttagaggccttcgttggaaacgggtttttttcctgtaaggctagacagaagaattctcagtaacttccttgtcttgtgtgtattcaactcacagagttgaacgatcctttacacagagcagacttgtaacactctttttgtggaatttgcaagtggagatttcagccgctttgaagtcaaaggtagaaaaggaaatatcttcctataaaaactagacagaatcattctaagaaactgctctgtgatgtgtgtgttcaactctcagagtttaacttttcttttccttcagcagtttggaaacactctgtttgtaaagtctgcacgtggataatttgaccacttagaggccttcgttggaaacgggttttttcatgtaaggctagacagaagaattctcagtaacttccttgtgttgtgtgtattcaactcacagagttgaccgatcctttacacagagcagacttgtaacactctttttttgtggaatttgcaagtggagatttcagccgctttgaagtcaatggtaaaaaaggaaatatcttcgtttcaaaactagacagaatgattctcagaaactcctttgtgatgtgtgcgttcaactcaaagagtttaacctttcttttcatagagcagttaggaaacactctgtttgtaaagtctgcaagtggatattcagacctctttgaggccttctttggaaacgggtttttttcatataaggctagacagaagaattcccagtaacttccttgtgttgtgtgtgttcaactcacagagttgaactttcatttacacagagcagatttgaaacactctttttgtggaatttgcaagtggagatttcaagcgctttgaggccaaaggcagaaaaggaaatatcttcgtttcaaaactagacagaatcattctcagaaactgctgcgtgatgtgtgcgttcaactctcagagtttaacttttcttttcattcagcggtttggaaacactctgtttgtaaagtctgcacgtggacattttgaccacttagaggccttcgttggaaacgggtttttttcatgtgaggctagacagaagaattcccagtaacttccttgtgttgtgtgcattcaactcacagagttgaacgttcccttagacagagcagatttgaaacactctatttgtgcaatttgcaagtgtagatttcaagcgctttaaggtcaatggcagaaaaggaaatatcttcgtttcaaaactagacagaatgattctcagtaaactccttagtgatgtgtgcgttcaactcacagagtttaacctttctgttcatagagcagttaggaaacactctgtttgtaaagtatgcaagtggatatacagacctccttgaggccttcgttggaaacgggatttcttcatattctgctagacagaagaattctcagtaacttccttgtgttgtgtgtattcaactcacagagttgaacgatcctttacacagagcagacttgaaacactctttttgtggaatttgcaagtggagatttcagccgctttgaggtcaatagtagaaaaggaaatatcttcgtagaaaaactagacagaatgattctcagaaactcctttgtgatgtgtgcgttcaactcacagagtttaacctttcttttcatagagcagttaggaaacactctgtttgtaaagtctgcaagtggatattcagacctccttgaggccttggttggaaacgggatttcttcatattatgctagacagaagaattcccagtaacttccttgtgttgtgtgtgttcaacttacagagttgaactttcatttacacagagcagatttgaaacactctttttgtggaatttgcaagtggagatttcaagcgctttgaggccaaaggcagaaaaggaaatatcttcgtataaaaactagacagaatcattctcagaaactgctctgcgatgtgtgcgttcaactctcagtgtttaacttttcttttcattcagcagtttggaaacactctgtttgtaaagtctgcacgtggatattttgaccacttagaggccttcgttggaaacgggttcttttcctgtaaggctagacagaagaattcccagtaacttccttgtgttgtgtacattcaactcacagagttgaacgttcccttagacagagcagatttgaaacactctttttgtgcaattggcaagtggagatatcaagcgctttaaggtcaatggcagaaaaggaaatatcttcgtttcaaaactagacagaatcattcccacaaactgcgttgtgatgtgttcgttcatctcacagagtttaacctttcttttcatagagcagttaggaaacactctgtttgtaaattctgtaagtggatattctgacatcttgtggccttcgttggaaacgggatttcttcatattctgctagacagaagaattctcagtaacttccttctgttgtgtgtattcaactcacagagttgaacgatcctttacacagagcagacctgaaacactctttttgtggaatttgcaagtggagatttcagccgctttgaggtcaatagtagaaaaggaaatatcttcgtagaaaaactaggcagaatgattctcagatactcctttgtgatgtgtgcgttcaactcacagagtttaacctttcttttcatggagcagttaggaaacactctgtttgtaaagtctgcaaggggatattcagacctctttgaggctttcgttggaaacgggatttcttcatattctgctagacagannnnnnnnnnnnnnnnnnnnnnnnnnnnnnnnnnnnnnnnnnnnnnnnnnnnnnnnnnnnnnnnnnnnnnnnnnnnnnnnnnnnnnnnnnnnnnnnnnnnnnnnnnnnnnnnnnnnnnnnnnnnnnnnnnnnnnnnnnnnnnnnnnnnnnnnnnnnnnnnnnnnnnnnnnnnnnnnnnnnnnnnnnnnnnnnnnnnnnnnnnnnnnnnnnnnnnnnnnnnnnnnnnnnnnnnnnnnnnnnnnnnnnnnnnnnnnnnnnnnnnnnnnnnnnnnnnnnnnnnnnnnnnnnnnnnnnnnnnnnnnnnnnnnnnnnnnnnnnnnnnnnnnnnnnnnnnnnnnnnnnnnnnnnnnnnnnnnnnnnnnnnnnnnnnnnnnnnnnnnnnnnnnnnnnnnnnnnnnnnnnnnnnnnnnnnnnnnnnnnnnnnnnnnnnnnnnnnnnnnnnnnnnnnnnnnnnnnnnnnnnnnnnnnnnnnnnnnnnnnnnnnnnnnnnnnnnnnnnnnnnnnnnnnnnnnnnnnnnnnnnnnnnnnnnnnnnnnnnnnnnnnnnnnnnnnnnnnnnnnnnnnnnnnnnnnnnnnnnnnnnnnnnnnnnnnnnnnnnnnnnnnnnnnnnnnnnnnnnnnnnnnnnnnnnnnnnnnnnnnnnnnnnnnnnnnnnnnnnnnnnnnnnnnnnnnnnnnnnnnnnnnnnnnnnnnnnnnnnnnnnnnnnnnnnnnnnnnnnnnnnnnnnnnnnnnnnnnnnnnnnnnnnnnnnnnnnnnnnnnnnnnnnnnnnnnnnnnnnnnnnnnnnnnnnnnnnnnnnnnnnnnnnnnnnnnnnnnnnnnnnnnnnnnnnnnnnnnnnnnnnnnnnnnnnnnnnnnnnnnnnnnnnnnnnnnnnnnnnnnnnnnnnnnnnnnnnnnnnnnnnnnnnnnnnnnnnnnnnnnnnnnnnnnnnnnnnnnnnnnnnnnnnnnnnnnnnnnnnnnnnnnnnnnnnnnnnnnnnnnnnnnnnnnnnnnnnnnnnnnnnnnnnnnnnnnnnnnnnnnnnnnnnnnnnnnnnnnnnnnnnnnnnnnnnnnnnnnnnnnnnnnnnnnnnnnnnnnnnnnnnnnnnnnnnnnnnnnnnnnnnnnnnnnnnnnnnnnnnnnnnnnnnnnnnnnnnnnnnnnnnnnnnnnnnnnnnnnnnnnnnnnnnnnnnnnnnnnnnnnnnnnnnnnnnnnnnnnnnnnnnnnnnnnnnnnnnnnnnnnnnnnnnnnnnnnnnnnnnnnnnnnnnnnnnnnnnnnnnnnnnnnnnnnnnnnnnnnnnnnnnnnnnnnnnnnnnnnnnnnnnnnnnnnnnnnnnnnnnnnnnnnnnnnnnnnnnnnnnnnnnnnnnnnnnnnnnnnnnnnnnnnnnnnnnnnnnnnnnnnnnnnnnnnnnnnnnnnnnnnnnnnnnnnnnnnnnnnnnnnnnnnnnnnnnnnnnnnnnnnnnnnnnnnnnnnnnnnnnnnnnnnnnnnnnnnnnnnnnnnnnnnnnnnnnnnnnnnnnnnnnnnnnnnnnnnnnnnnnnnnnnnnnnnnnnnnnnnnnnnnnnnnnnnnnnnnnnnnnnnnnnnnnnnnnnnnnnnnnnnnnnnnnnnnnnnnnnnnnnnnnnnnnnnnnnnnnnnnnnnnnnnnnnnnnnnnnnnnnnnnnnnnnnnnnnnnnnnnnnnnnnnnnnnnnnnnnnnnnnnnnnnnnnnnnnnnnnnnnnnnnnnnnnnnnnnnnnnnnnnnnnnnnnnnnnnnnnnnnnnnnnnnnnnnnnnnnnnnnnnnnnnnnnnnnnnnnnnnnnnnnnnnnnnnnnnnnnnnnnnnnnnnnnnnnnnnnnnnnnnnnnnnnnnnnnnnnnnnnnnnnnnnnnnnnnnnnnnnnnnnnnnnnnnnnnnnnnnnnnnnnnnnnnnnnnnnnnnnnnnnnnnnnnnnnnnnnnnnnnnnnnnnnnnnnnnnnnnnnnnnnnnnnnnnnnnnnnnnnnnnnnnnnnnnnnnnnnnnnnnnnnnnnnnnnnnnnnnnnnnnnnnnnnnnnnnnnnnnnnnnnnnnnnnnnnnnnnnnnnnnnnnnnnnnnnnnnnnnnnnnnnnnnnnnnnnnnnnnnnnnnnnnnnnnnnnnnnnnnnnnnnnnnnnnnnnnnnnnnnnnnnnnnnnnnnnnnnnnnnnnnnnnnnnnnnnnnnnnnnnnnnnnnnnnnnnnnnnnnnnnnnnnnnnnnnnnnnnnnnnnnnnnnnnnnnnnnnnnnnnnnnnnnnnnnnnnnnnnnnnnnnnnnnnnnnnnnnnnnnnnnnnnnnnnnnnnnnnnnnnnnnnnnnnnnnnnnnnnnnnnnnnnnnnnnnnnnnnnnnnnnnnnnnnnnnnnnnnnnnnnnnnnnnnnnnnnnnnnnnnnnnnnnnnnnnnnnnnnnnnnnnnnnnnnnnnnnnnnnnnnnnnnnnnnnnnnnnnnnnnnnnnnnnnnnnnnnnnnnnnnnnnnnnnnnnnnnnnnnnnnnnnnnnnnnnnnnnnnnnnnnnnnnnnnnnnnnnnnnnnnnnnnnnnnnnnnnnnnnnnnnnnnnnnnnnnnnnnnnnnnnnnnnnnnnnnnnnnnnnnnnnnnnnnnnnnnnnnnnnnnnnnnnnnnnnnnnnnnnnnnnnnnnnnnnnnnnnnnnnnnnnnnnnnnnnnnnnnnnnnnnnnnnnnnnnnnnnnnnnnnnnnnnnnnnnnnnnnnnnnnnnnnnnnnnnnnnnnnnnnnnnnnnnnnnnnnnnnnnnnnnnnnnnnnnnnnnnnnnnnnnnnnnnnnnnnnnnnnnnnnnnnnnnnnnnnnnnnnnnnnnnnnnnnnnnnnnnnnnnnnnnnnnnnnnnnnnnnnnnnnnnnnnnnnnnnnnnnnnnnnnnnnnnnnnnnnnnnnnnnnnnnnnnnnnnnnnnnnnnnnnnnnnnnnnnnnnnnnnnnnnnnnnnnnnnnnnnnnnnnnnnnnnnnnnnnnnnnnnnnnnnnnnnnnnnnnnnnnnnnnnnnnnnnnnnnnnnnnnnnnnnnnnnnnnnnnnnnnnnnnnnnnnnnnnnnnnnnnnnnnnnnnnnnnnnnnnnnnnnnnnnnnnnnnnnnnnnnnnnnnnnnnnnnnnnnnnnnnnnnnnnnnnnnnnnnnnnnnnnnnnnnnnnnnnnnnnnnnnnnnnnnnnnnnnnnnnnnnnnnnnnnnnnnnnnnnnnnnnnnnnnnnnnnnnnnnnnnnnnnnnnnnnnnnnnnnnnnnnnnnnnnnnnnnnnnnnnnnnnnnnnnnnnnnnnnnnnnnnnnnnnnnnnnnnnnnnnnnnnnnnnnnnnnnnnnnnnnnnnnnnnnnnnnnnnnnnnnnnnnnnnnnnnnnnnnnnnnnnnnnnnnnnnnnnnnnnnnnnnnnnnnnnnnnnnnnnnnnnnnnnnnnnnnnnnnnnnnnnnnnnnnnnnnnnnnnnnnnnnnnnnnnnnnnnnnnnnnnnnnnnnnnnnnnnnnnnnnnnnnnnnnnnnnnnnnnnnnnnnnnnnnnnnnnnnnnnnnnnnnnnnnnnnnnnnnnnnnnnnnnnnnnnnnnnnnnnnnnnnnnnnnnnnnnnnnnnnnnnnnnnnnnnnnnnnnnnnnnnnnnnnnnnnnnnnnnnnnnnnnnnnnnnnnnnnnnnnnnnnnnnnnnnnnnnnnnnnnnnnnnnnnnnnnnnnnnnnnnnnnnnnnnnnnnnnnnnnnnnnnnnnnnnnnnnnnnnnnnnnnnnnnnnnnnnnnnnnnnnnnnnnnnnnnnnnnnnnnnnnnnnnnnnnnnnnnnnnnnnnnnnnnnnnnnnnnnnnnnnnnnnnnnnnnnnnnnnnnnnnnnnnnnnnnnnnnnnnnnnnnnnnnnnnnnnnnnnnnnnnnnnnnnnnnnnnnnnnnnnnnnnnnnnnnnnnnnnnnnnnnnnnnnnnnnnnnnnnnnnnnnnnnnnnnnnnnnnnnnnnnnnnnnnnnnnnnnnnnnnnnnnnnnnnnnnnnnnnnnnnnnnnnnnnnnnnnnnnnnnnnnnnnnnnnnnnnnnnnnnnnnnnnnnnnnnnnnnnnnnnnnnnnnnnnnnnnnnnnnnnnnnnnnnnnnnnnnnnnnnnnnnnnnnnnnnnnnnnnnnnnnnnnnnnnnnnnnnnnnnnnnnnnnnnnnnnnnnnnnnnnnnnnnnnnnnnnnnnnnnnnnnnnnnnnnnnnnnnnnnnnnnnnnnnnnnnnnnnnnnnnnnnnnnnnnnnnnnnnnnnnnnnnnnnnnnnnnnnnnnnnnnnnnnnnnnnnnnnnnnnnnnnnnnnnnnnnnnnnnnnnnnnnnnnnnnnnnnnnnnnnnnnnnnnnnnnnnnnnnnnnnnnnnnnnnnnnnnnnnnnnnnnnnnnnnnnnnnnnnnnnnnnnnnnnnnnnnnnnnnnnnnnnnnnnnnnnnnnnnnnnnnnnnnnnnnnnnnnnnnnnnnnnnnnnnnnnnnnnnnnnnnnnnnnnnnnnnnnnnnnnnnnnnnnnnnnnnnnnnnnnnnnnnnnnnnnnnnnnnnnnnnnnnnnnnnnnnnnnnnnnnnnnnnnnnnnnnnnnnnnnnnnnnnnnnnnnnnnnnnnnnnnnnnnnnnnnnnnnnnnnnnnnnnnnnnnnnnnnnnnnnnnnnnnnnnnnnnnnnnnnnnnnnnnnnnnnnnnnnnnnnnnnnnnnnnnnnnnnnnnnnnnnnnnnnnnnnnnnnnnnnnnnnnnnnnnnnnnnnnnnnnnnnnnnnnnnnnnnnnnnnnnnnnnnnnnnnnnnnnnnnnnnnnnnnnnnnnnnnnnnnnnnnnnnnnnnnnnnnnnnnnnnnnnnnnnnnnnnnnnnnnnnnnnnnnnnnnnnnnnnnnnnnnnnnnnnnnnnnnnnnnnnnnnnnnnnnnnnnnnnnnnnnnnnnnnnnnnnnnnnnnnnnnnnnnnnnnnnnnnnnnnnnnnnnnnnnnnnnnnnnnnnnnnnnnnnnnnnnnnnnnnnnnnnnnnnnnnnnnnnnnnnnnnnnnnnnnnnnnnnnnnnnnnnnnnnnnnnnnnnnnnnnnnnnnnnnnnnnnnnnnnnnnnnnnnnnnnnnnnnnnnnnnnnnnnnnnnnnnnnnnnnnnnnnnnnnnnnnnnnnnnnnnnnnnnnnnnnnnnnnnnnnnnnnnnnnnnnnnnnnnnnnnnnnnnnnnnnnnnnnnnnnnnnnnnnnnnnnnnnnnnnnnnnnnnnnnnnnnnnnnnnnnnnnnnnnnnnnnnnnnnnnnnnnnnnnnnnnnnnnnnnnnnnnnnnnnnnnnnnnnnnnnnnnnnnnnnnnnnnnnnnnnnnnnnnnnnnnnnnnnnnnnnnnnnnnnnnnnnnnnnnnnnnnnnnnnnnnnnnnnnnnnnnnnnnnnnnnnnnnnnnnnnnnnnnnnnnnnnnnnnnnnnnnnnnnnnnnnnnnnnnnnnnnnnnnnnnnnnnnnnnnnnnnnnnnnnnnnnnnnnnnnnnnnnnnnnnnnnnnnnnnnnnnnnnnnnnnnnnnnnnnnnnnnnnnnnnnnnnnnnnnnnnnnnnnnnnnnnnnnnnnnnnnnnnnnnnnnnnnnnnnnnnnnnnnnnnnnnnnnnnnnnnnnnnnnnnnnnnnnnnnnnnnnnnnnnnnnnnnnnnnnnnnnnnnnnnnnnnnnnnnnnnnnnnnnnnnnnnnnnnnnnnnnnnnnnnnnnnnnnnnnnnnnnnnnnnnnnnnnnnnnnnnnnnnnnnnnnnnnnnnnnnnnnnnnnnnnnnnnnnnnnnnnnnnnnnnnnnnnnnnnnnnnnnnnnnnnnnnnnnnnnnnnnnnnnnnnnnnnnnnnnnnnnnnnnnnnnnnnnnnnnnnnnnnnnnnnnnnnnnnnnnnnnnnnnnnnnnnnnnnnnnnnnnnnnnnnnnnnnnnnnnnnnnnnnnnnnnnnnnnnnnnnnnnnnnnnnnnnnnnnnnnnnnnnnnnnnnnnnnnnnnnnnnnnnnnnnnnnnnnnnnnnnnnnnnnnnnnnnnnnnnnnnnnnnnnnnnnnnnnnnnnnnnnnnnnnnnnnnnnnnnnnnnnnnnnnnnnnnnnnnnnnnnnnnnnnnnnnnnnnnnnnnnnnnnnnnnnnnnnnnnnnnnnnnnnnnnnnnnnnnnnnnnnnnnnnnnnnnnnnnnnnnnnnnnnnnnnnnnnnnnnnnnnnnnnnnnnnnnnnnnnnnnnnnnnnnnnnnnnnnnnnnnnnnnnnnnnnnnnnnnnnnnnnnnnnnnnnnnnnnnnnnnnnnnnnnnnnnnnnnnnnnnnnnnnnnnnnnnnnnnnnnnnnnnnnnnnnnnnnnnnnnnnnnnnnnnnnnnnnnnnnnnnnnnnnnnnnnnnnnnnnnnnnnnnnnnnnnnnnnnnnnnnnnnnnnnnnnnnnnnnnnnnnnnnnnnnnnnnnnnnnnnnnnnnnnnnnnnnnnnnnnnnnnnnnnnnnnnnnnnnnnnnnnnnnnnnnnnnnnnnnnnnnnnnnnnnnnnnnnnnnnnnnnnnnnnnnnnnnnnnnnnnnnnnnnnnnnnnnnnnnnnnnnnnnnnnnnnnnnnnnnnnnnnnnnnnnnnnnnnnnnnnnnnnnnnnnnnnnnnnnnnnnnnnnnnnnnnnnnnnnnnnnnnnnnnnnnnnnnnnnnnnnnnnnnnnnnnnnnnnnnnnnnnnnnnnnnnnnnnnnnnnnnnnnnnnnnnnnnnnnnnnnnnnnnnnnnnnnnnnnnnnnnnnnnnnnnnnnnnnnnnnnnnnnnnnnnnnnnnnnnnnnnnnnnnnnnnnnnnnnnnnnnnnnnnnnnnnnnnnnnnnnnnnnnnnnnnnnnnnnnnnnnnnnnnnnnnnnnnnnnnnnnnnnnnnnnnnnnnnnnnnnnnnnnnnnnnnnnnnnnnnnnnnnnnnnnnnnnnnnnnnnnnnnnnnnnnnnnnnnnnnnnnnnnnnnnnnnnnnnnnnnnnnnnnnnnnnnnnnnnnnnnnnnnnnnnnnnnnnnnnnnnnnnnnnnnnnnnnnnnnnnnnnnnnnnnnnnnnnnnnnnnnnnnnnnnnnnnnnnnnnnnnnnnnnnnnnnnnnnnnnnnnnnnnnnnnnnnnnnnnnnnnnnnnnnnnnnnnnnnnnnnnnnnnnnnnnnnnnnnnnnnnnnnnnnnnnnnnnnnnnnnnnnnnnnnnnnnnnnnnnnnnnnnnnnnnnnnnnnnnnnnnnnnnnnnnnnnnnnnnnnnnnnnnnnnnnnnnnnnnnnnnnnnnnnnnnnnnnnnnnnnnnnnnnnnnnnnnnnnnnnnnnnnnnnnnnnnnnnnnnnnnnnnnnnnnnnnnnnnnnnnnnnnnnnnnnnnnnnnnnnnnnnnnnnnnnnnnnnnnnnnnnnnnnnnnnnnnnnnnnnnnnnnnnnnnnnnnnnnnnnnnnnnnnnnnnnnnnnnnnnnnnnnnnnnnnnnnnnnnnnnnnnnnnnnnnnnnnnnnnnnnnnnnnnnnnnnnnnnnnnnnnnnnnnnnnnnnnnnnnnnnnnnnnnnnnnnnnnnnnnnnnnnnnnnnnnnnnnnnnnnnnnnnnnnnnnnnnnnnnnnnnnnnnnnnnnnnnnnnnnnnnnnnnnnnnnnnnnnnnnnnnnnnnnnnnnnnnnnnnnnnnnnnnnnnnnnnnnnnnnnnnnnnnnnnnnnnnnnnnnnnnnnnnnnnnnnnnnnnnnnnnnnnnnnnnnnnnnnnnnnnnnnnnnnnnnnnnnnnnnnnnnnnnnnnnnnnnnnnnnnnnnnnnnnnnnnnnnnnnnnnnnnnnnnnnnnnnnnnnnnnnnnnnnnnnnnnnnnnnnnnnnnnnnnnnnnnnnnnnnnnnnnnnnnnnnnnnnnnnnnnnnnnnnnnnnnnnnnnnnnnnnnnnnnnnnnnnnnnnnnnnnnnnnnnnnnnnnnnnnnnnnnnnnnnnnnnnnnnnnnnnnnnnnnnnnnnnnnnnnnnnnnnnnnnnnnnnnnnnnnnnnnnnnnnnnnnnnnnnnnnnnnnnnnnnnnnnnnnnnnnnnnnnnnnnnnnnnnnnnnnnnnnnnnnnnnnnnnnnnnnnnnnnnnnnnnnnnnnnnnnnnnnnnnnnnnnnnnnnnnnnnnnnnnnnnnnnnnnnnnnnnnnnnnnnnnnnnnnnnnnnnnnnnnnnnnnnnnnnnnnnnnnnnnnnnnnnnnnnnnnnnnnnnnnnnnnnnnnnnnnnnnnnnnnnnnnnnnnnnnnnnnnnnnnnnnnnnnnnnnnnnnnnnnnnnnnnnnnnnnnnnnnnnnnnnnnnnnnnnnnnnnnnnnnnnnnnnnnnnnnnnnnnnnnnnnnnnnnnnnnnnnnnnnnnnnnnnnnnnnnnnnnnnnnnnnnnnnnnnnnnnnnnnnnnnnnnnnnnnnnnnnnnnnnnnnnnnnnnnnnnnnnnnnnnnnnnnnnnnnnnnnnnnnnnnnnnnnnnnnnnnnnnnnnnnnnnnnnnnnnnnnnnnnnnnnnnnnnnnnnnnnnnnnnnnnnnnnnnnnnnnnnnnnnnnnnnnnnnnnnnnnnnnnnnnnnnnnnnnnnnnnnnnnnnnnnnnnnnnnnnnnnnnnnnnnnnnnnnnnnnnnnnnnnnnnnnnnnnnnnnnnnnnnnnnnnnnnnnnnnnnnnnnnnnnnnnnnnnnnnnnnnnnnnnnnnnnnnnnnnnnnnnnnnnnnnnnnnnnnnnnnnnnnnnnnnnnnnnnnnnnnnnnnnnnnnnnnnnnnnnnnnnnnnnnnnnnnnnnnnnnnnnnnnnnnnnnnnnnnnnnnnnnnnnnnnnnnnnnnnnnnnnnnnnnnnnnnnnnnnnnnnnnnnnnnnnnnnnnnnnnnnnnnnnnnnnnnnnnnnnnnnnnnnnnnnnnnnnnnnnnnnnnnnnnnnnnnnnnnnnnnnnnnnnnnnnnnnnnnnnnnnnnnnnnnnnnnnnnnnnnnnnnnnnnnnnnnnnnnnnnnnnnnnnnnnnnnnnnnnnnnnnnnnnnnnnnnnnnnnnnnnnnnnnnnnnnnnnnnnnnnnnnnnnnnnnnnnnnnnnnnnnnnnnnnnnnnnnnnnnnnnnnnnnnnnnnnnnnnnnnnnnnnnnnnnnnnnnnnnnnnnnnnnnnnnnnnnnnnnnnnnnnnnnnnnnnnnnnnnnnnnnnnnnnnnnnnnnnnnnnnnnnnnnnnnnnnnnnnnnnnnnnnnnnnnnnnnnnnnnnnnnnnnnnnnnnnnnnnnnnnnnnnnnnnnnnnnnnnnnnnnnnnnnnnnnnnnnnnnnnnnnnnnnnnnnnnnnnnnnnnnnnnnnnnnnnnnnnnnnnnnnnnnnnnnnnnnnnnnnnnnnnnnnnnnnnnnnnnnnnnnnnnnnnnnnnnnnnnnnnnnnnnnnnnnnnnnnnnnnnnnnnnnnnnnnnnnnnnnnnnnnnnnnnnnnnnnnnnnnnnnnnnnnnnnnnnnnnnnnnnnnnnnnnnnnnnnnnnnnnnnnnnnnnnnnnnnnnnnnnnnnnnnnnnnnnnnnnnnnnnnnnnnnnnnnnnnnnnnnnnnnnnnnnnnnnnnnnnnnnnnnnnnnnnnnnnnnnnnnnnnnnnnnnnnnnnnnnnnnnnnnnnnnnnnnnnnnnnnnnnnnnnnnnnnnnnnnnnnnnnnnnnnnnnnnnnnnnnnnnnnnnnnnnnnnnnnnnnnnnnnnnnnnnnnnnnnnnnnnnnnnnnnnnnnnnnnnnnnnnnnnnnnnnnnnnnnnnnnnnnnnnnnnnnnnnnnnnnnnnnnnnnnnnnnnnnnnnnnnnnnnnnnnnnnnnnnnnnnnnnnnnnnnnnnnnnnnnnnnnnnnnnnnnnnnnnnnnnnnnnnnnnnnnnnnnnnnnnnnnnnnnnnnnnnnnnnnnnnnnnnnnnnnnnnnnnnnnnnnnnnnnnnnnnnnnnnnnnnnnnnnnnnnnnnnnnnnnnnnnnnnnnnnnnnnnnnnnnnnnnnnnnnnnnnnnnnnnnnnnnnnnnnnnnnnnnnnnnnnnnnnnnnnnnnnnnnnnnnnnnnnnnnnnnnnnnnnnnnnnnnnnnnnnnnnnnnnnnnnnnnnnnnnnnnnnnnnnnnnnnnnnnnnnnnnnnnnnnnnnnnnnnnnnnnnnnnnnnnnnnnnnnnnnnnnnnnnnnnnnnnnnnnnnnnnnnnnnnnnnnnnnnnnnnnnnnnnnnnnnnnnnnnnnnnnnnnnnnnnnnnnnnnnnnnnnnnnnnnnnnnnnnnnnnnnnnnnnnnnnnnnnnnnnnnnnnnnnnnnnnnnnnnnnnnnnnnnnnnnnnnnnnnnnnnnnnnnnnnnnnnnnnnnnnnnnnnnnnnnnnnnnnnnnnnnnnnnnnnnnnnnnnnnnnnnnnnnnnnnnnnnnnnnnnnnnnnnnnnnnnnnnnnnnnnnnnnnnnnnnnnnnnnnnnnnnnnnnnnnnnnnnnnnnnnnnnnnnnnnnnnnnnnnnnnnnnnnnnnnnnnnnnnnnnnnnnnnnnnnnnnnnnnnnnnnnnnnnnnnnnnnnnnnnnnnnnnnnnnnnnnnnnnnnnnnnnnnnnnnnnnnnnnnnnnnnnnnnnnnnnnnnnnnnnnnnnnnnnnnnnnnnnnnnnnnnnnnnnnnnnnnnnnnnnnnnnnnnnnnnnnnnnnnnnnnnnnnnnnnnnnnnnnnnnnnnnnnnnnnnnnnnnnnnnnnnnnnnnnnnnnnnnnnnnnnnnnnnnnnnnnnnnnnnnnnnnnnnnnnnnnnnnnnnnnnnnnnnnnnnnnnnnnnnnnnnnnnnnnnnnnnnnnnnnnnnnnnnnnnnnnnnnnnnnnnnnnnnnnnnnnnnnnnnnnnnnnnnnnnnnnnnnnnnnnnnnnnnnnnnnnnnnnnnnnnnnnnnnnnnnnnnnnnnnnnnnnnnnnnnnnnnnnnnnnnnnnnnnnnnnnnnnnnnnnnnnnnnnnnnnnnnnnnnnnnnnnnnnnnnnnnnnnnnnnnnnnnnnnnnnnnnnnnnnnnnnnnnnnnnnnnnnnnnnnnnnnnnnnnnnnnnnnnnnnnnnnnnnnnnnnnnnnnnnnnnnnnnnnnnnnnnnnnnnnnnnnnnnnnnnnnnnnnnnnnnnnnnnnnnnnnnnnnnnnnnnnnnnnnnnnnnnnnnnnnnnnnnnnnnnnnnnnnnnnnnnnnnnnnnnnnnnnnnnnnnnnnnnnnnnnnnnnnnnnnnnnnnnnnnnnnnnnnnnnnnnnnnnnnnnnnnnnnnnnnnnnnnnnnnnnnnnnnnnnnnnnnnnnnnnnnnnnnnnnnnnnnnnnnnnnnnnnnnnnnnnnnnnnnnnnnnnnnnnnnnnnnnnnnnnnnnnnnnnnnnnnnnnnnnnnnnnnnnnnnnnnnnnnnnnnnnnnnnnnnnnnnnnnnnnnnnnnnnnnnnnnnnnnnnnnnnnnnnnnnnnnnnnnnnnnnnnnnnnnnnnnnnnnnnnnnnnnnnnnnnnnnnnnnnnnnnnnnnnnnnnnnnnnnnnnnnnnnnnnnnnnnnnnnnnnnnnnnnnnnnnnnnnnnnnnnnnnnnnnnnnnnnnnnnnnnnnnnnnnnnnnnnnnnnnnnnnnnnnnnnnnnnnnnnnnnnnnnnnnnnnnnnnnnnnnnnnnnnnnnnnnnnnnnnnnnnnnnnnnnnnnnnnnnnnnnnnnnnnnnnnnnnnnnnnnnnnnnnnnnnnnnnnnnnnnnnnnnnnnnnnnnnnnnnnnnnnnnnnnnnnnnnnnnnnnnnnnnnnnnnnnnnnnnnnnnnnnnnnnnnnnnnnnnnnnnnnnnnnnnnnnnnnnnnnnnnnnnnnnnnnnnnnnnnnnnnnnnnnnnnnnnnnnnnnnnnnnnnnnnnnnnnnnnnnnnnnnnnnnnnnnnnnnnnnnnnnnnnnnnnnnnnnnnnnnnnnnnnnnnnnnnnnnnnnnnnnnnnnnnnnnnnnnnnnnnnnnnnnnnnnnnnnnnnnnnnnnnnnnnnnnnnnnnnnnnnnnnnnnnnnnnnnnnnnnnnnnnnnnnnnnnnnnnnnnnnnnnnnnnnnnnnnnnnnnnnnnnnnnnnnnnnnnnnnnnnnnnnnnnnnnnnnnnnnnnnnnnnnnnnnnnnnnnnnnnnnnnnnnnnnnnnnnnnnnnnnnnnnnnnnnnnnnnnnnnnnnnnnnnnnnnnnnnnnnnnnnnnnnnnnnnnnnnnnnnnnnnnnnnnnnnnnnnnnnnnnnnnnnnnnnnnnnnnnnnnnnnnnnnnnnnnnnnnnnnnnnnnnnnnnnnnnnnnnnnnnnnnnnnnnnnnnnnnnnnnnnnnnnnnnnnnnnnnnnnnnnnnnnnnnnnnnnnnnnnnnnnnnnnnnnnnnnnnnnnnnnnnnnnnnnnnnnnnnnnnnnnnnnnnnnnnnnnnnnnnnnnnnnnnnnnnnnnnnnnnnnnnnnnnnnnnnnnnnnnnnnnnnnnnnnnnnnnnnnnnnnnnnnnnnnnnnnnnnnnnnnnnnnnnnnnnnnnnnnnnnnnnnnnnnnnnnnnnnnnnnnnnnnnnnnnnnnnnnnnnnnnnnnnnnnnnnnnnnnnnnnnnnnnnnnnnnnnnnnnnnnnnnnnnnnnnnnnnnnnnnnnnnnnnnnnnnnnnnnnnnnnnnnnnnnnnnnnnnnnnnnnnnnnnnnnnnnnnnnnnnnnnnnnnnnnnnnnnnnnnnnnnnnnnnnnnnnnnnnnnnnnnnnnnnnnnnnnnnnnnnnnnnnnnnnnnnnnnnnnnnnnnnnnnnnnnnnnnnnnnnnnnnnnnnnnnnnnnnnnnnnnnnnnnnnnnnnnnnnnnnnnnnnnnnnnnnnnnnnnnnnnnnnnnnnnnnnnnnnnnnnnnnnnnnnnnnnnnnnnnnnnnnnnnnnnnnnnnnnnnnnnnnnnnnnnnnnnnnnnnnnnnnnnnnnnnnnnnnnnnnnnnnnnnnnnnnnnnnnnnnnnnnnnnnnnnnnnnnnnnnnnnnnnnnnnnnnnnnnnnnnnnnnnnnnnnnnnnnnnnnnnnnnnnnnnnnnnnnnnnnnnnnnnnnnnnnnnnnnnnnnnnnnnnnnnnnnnnnnnnnnnnnnnnnnnnnnnnnnnnnnnnnnnnnnnnnnnnnnnnnnnnnnnnnnnnnnnnnnnnnnnnnnnnnnnnnnnnnnnnnnnnnnnnnnnnnnnnnnnnnnnnnnnnnnnnnnnnnnnnnnnnnnnnnnnnnnnnnnnnnnnnnnnnnnnnnnnnnnnnnnnnnnnnnnnnnnnnnnnnnnnnnnnnnnnnnnnnnnnnnnnnnnnnnnnnnnnnnnnnnnnnnnnnnnnnnnnnnnnnnnnnnnnnnnnnnnnnnnnnnnnnnnnnnnnnnnnnnnnnnnnnnnnnnnnnnnnnnnnnnnnnnnnnnnnnnnnnnnnnnnnnnnnnnnnnnnnnnnnnnnnnnnnnnnnnnnnnnnnnnnnnnnnnnnnnnnnnnnnnnnnnnnnnnnnnnnnnnnnnnnnnnnnnnnnnnnnnnnnnnnnnnnnnnnnnnnnnnnnnnnnnnnnnnnnnnnnnnnnnnnnnnnnnnnnnnnnnnnnnnnnnnnnnnnnnnnnnnnnnnnnnnnnnnnnnnnnnnnnnnnnnnnnnnnnnnnnnnnnnnnnnnnnnnnnnnnnnnnnnnnnnnnnnnnnnnnnnnnnnnnnnnnnnnnnnnnnnnnnnnnnnnnnnnnnnnnnnnnnnnnnnnnnnnnnnnnnnnnnnnnnnnnnnnnnnnnnnnnnnnnnnnnnnnnnnnnnnnnnnnnnnnnnnnnnnnnnnnnnnnnnnnnnnnnnnnnnnnnnnnnnnnnnnnnnnnnnnnnnnnnnnnnnnnnnnnnnnnnnnnnnnnnnnnnnnnnnnnnnnnnnnnnnnnnnnnnnnnnnnnnnnnnnnnnnnnnnnnnnnnnnnnnnnnnnnnnnnnnnnnnnnnnnnnnnnnnnnnnnnnnnnnnnnnnnnnnnnnnnnnnnnnnnnnnnnnnnnnnnnnnnnnnnnnnnnnnnnnnnnnnnnnnnnnnnnnnnnnnnnnnnnnnnnnnnnnnnnnnnnnnnnnnnnnnnnnnnnnnnnnnnnnnnnnnnnnnnnnnnnnnnnnnnnnnnnnnnnnnnnnnnnnnnnnnnnnnnnnnnnnnnnnnnnnnnnnnnnnnnnnnnnnnnnnnnnnnnnnnnnnnnnnnnnnnnnnnnnnnnnnnnnnnnnnnnnnnnnnnnnnnnnnnnnnnnnnnnnnnnnnnnnnnnnnnnnnnnnnnnnnnnnnnnnnnnnnnnnnnnnnnnnnnnnnnnnnnnnnnnnnnnnnnnnnnnnnnnnnnnnnnnnnnnnnnnnnnnnnnnnnnnnnnnnnnnnnnnnnnnnnnnnnnnnnnnnnnnnnnnnnnnnnnnnnnnnnnnnnnnnnnnnnnnnnnnnnnnnnnnnnnnnnnnnnnnnnnnnnnnnnnnnnnnnnnnnnnnnnnnnnnnnnnnnnnnnnnnnnnnnnnnnnnnnnnnnnnnnnnnnnnnnnnnnnnnnnnnnnnnnnnnnnnnnnnnnnnnnnnnnnnnnnnnnnnnnnnnnnnnnnnnnnnnnnnnnnnnnnnnnnnnnnnnnnnnnnnnnnnnnnnnnnnnnnnnnnnnnnnnnnnnnnnnnnnnnnnnnnnnnnnnnnnnnnnnnnnnnnnnnnnnnnnnnnnnnnnnnnnnnnnnnnnnnnnnnnnnnnnnnnnnnnnnnnnnnnnnnnnnnnnnnnnnnnnnnnnnnnnnnnnnnnnnnnnnnnnnnnnnnnnnnnnnnnnnnnnnnnnnnnnnnnnnnnnnnnnnnnnnnnnnnnnnnnnnnnnnnnnnnnnnnnnnnnnnnnnnnnnnnnnnnnnnnnnnnnnnnnnnnnnnnnnnnnnnnnnnnnnnnnnnnnnnnnnnnnnnnnnnnnnnnnnnnnnnnnnnnnnnnnnnnnnnnnnnnnnnnnnnnnnnnnnnnnnnnnnnnnnnnnnnnnnnnnnnnnnnnnnnnnnnnnnnnnnnnnnnnnnnnnnnnnnnnnnnnnnnnnnnnnnnnnnnnnnnnnnnnnnnnnnnnnnnnnnnnnnnnnnnnnnnnnnnnnnnnnnnnnnnnnnnnnnnnnnnnnnnnnnnnnnnnnnnnnnnnnnnnnnnnnnnnnnnnnnnnnnnnnnnnnnnnnnnnnnnnnnnnnnnnnnnnnnnnnnnnnnnnnnnnnnnnnnnnnnnnnnnnnnnnnnnnnnnnnnnnnnnnnnnnnnnnnnnnnnnnnnnnnnnnnnnnnnnnnnnnnnnnnnnnnnnnnnnnnnnnnnnnnnnnnnnnnnnnnnnnnnnnnnnnnnnnnnnnnnnnnnnnnnnnnnnnnnnnnnnnnnnnnnnnnnnnnnnnnnnnnnnnnnnnnnnnnnnnnnnnnnnnnnnnnnnnnnnnnnnnnnnnnnnnnnnnnnnnnnnnnnnnnnnnnnnnnnnnnnnnnnnnnnnnnnnnnnnnnnnnnnnnnnnnnnnnnnnnnnnnnnnnnnnnnnnnnnnnnnnnnnnnnnnnnnnnnnnnnnnnnnnnnnnnnnnnnnnnnnnnnnnnnnnnnnnnnnnnnnnnnnnnnnnnnnnnnnnnnnnnnnnnnnnnnnnnnnnnnnnnnnnnnnnnnnnnnnnnnnnnnnnnnnnnnnnnnnnnnnnnnnnnnnnnnnnnnnnnnnnnnnnnnnnnnnnnnnnnnnnnnnnnnnnnnnnnnnnnnnnnnnnnnnnnnnnnnnnnnnnnnnnnnnnnnnnnnnnnnnnnnnnnnnnnnnnnnnnnnnnnnnnnnnnnnnnnnnnnnnnnnnnnnnnnnnnnnnnnnnnnnnnnnnnnnnnnnnnnnnnnnnnnnnnnnnnnnnnnnnnnnnnnnnnnnnnnnnnnnnnnnnnnnnnnnnnnnnnnnnnnnnnnnnnnnnnnnnnnnnnnnnnnnnnnnnnnnnnnnnnnnnnnnnnnnnnnnnnnnnnnnnnnnnnnnnnnnnnnnnnnnnnnnnnnnnnnnnnnnnnnnnnnnnnnnnnnnnnnnnnnnnnnnnnnnnnnnnnnnnnnnnnnnnnnnnnnnnnnnnnnnnnnnnnnnnnnnnnnnnnnnnnnnnnnnnnnnnnnnnnnnnnnnnnnnnnnnnnnnnnnnnnnnnnnnnnnnnnnnnnnnnnnnnnnnnnnnnnnnnnnnnnnnnnnnnnnnnnnnnnnnnnnnnnnnnnnnnnnnnnnnnnnnnnnnnnnnnnnnnnnnnnnnnnnnnnnnnnnnnnnnnnnnnnnnnnnnnnnnnnnnnnnnnnnnnnnnnnnnnnnnnnnnnnnnnnnnnnnnnnnnnnnnnnnnnnnnnnnnnnnnnnnnnnnnnnnnnnnnnnnnnnnnnnnnnnnnnnnnnnnnnnnnnnnnnnnnnnnnnnnnnnnnnnnnnnnnnnnnnnnnnnnnnnnnnnnnnnnnnnnnnnnnnnnnnnnnnnnnnnnnnnnnnnnnnnnnnnnnnnnnnnnnnnnnnnnnnnnnnnnnnnnnnnnnnnnnnnnnnnnnnnnnnnnnnnnnnnnnnnnnnnnnnnnnnnnnnnnnnnnnnnnnnnnnnnnnnnnnnnnnnnnnnnnnnnnnnnnnnnnnnnnnnnnnnnnnnnnnnnnnnnnnnnnnnnnnnnnnnnnnnnnnnnnnnnnnnnnnnnnnnnnnnnnnnnnnnnnnnnnnnnnnnnnnnnnnnnnnnnnnnnnnnnnnnnnnnnnnnnnnnnnnnnnnnnnnnnnnnnnnnnnnnnnnnnnnnnnnnnnnnnnnnnnnnnnnnnnnnnnnnnnnnnnnnnnnnnnnnnnnnnnnnnnnnnnnnnnnnnnnnnnnnnnnnnnnnnnnnnnnnnnnnnnnnnnnnnnnnnnnnnnnnnnnnnnnnnnnnnnnnnnnnnnnnnnnnnnnnnnnnnnnnnnnnnnnnnnnnnnnnnnnnnnnnnnnnnnnnnnnnnnnnnnnnnnnnnnnnnnnnnnnnnnnnnnnnnnnnnnnnnnnnnnnnnnnnnnnnnnnnnnnnnnnnnnnnnnnnnnnnnnnnnnnnnnnnnnnnnnnnnnnnnnnnnnnnnnnnnnnnnnnnnnnnnnnnnnnnnnnnnnnnnnnnnnnnnnnnnnnnnnnnnnnnnnnnnnnnnnnnnnnnnnnnnnnnnnnnnnnnnnnnnnnnnnnnnnnnnnnnnnnnnnnnnnnnnnnnnnnnnnnnnnnnnnnnnnnnnnnnnnnnnnnnnnnnnnnnnnnnnnnnnnnnnnnnnnnnnnnnnnnnnnnnnnnnnnnnnnnnnnnnnnnnnnnnnnnnnnnnnnnnnnnnnnnnnnnnnnnnnnnnnnnnnnnnnnnnnnnnnnnnnnnnnnnnnnnnnnnnnnnnnnnnnnnnnnnnnnnnnnnnnnnnnnnnnnnnnnnnnnnnnnnnnnnnnnnnnnnnnnnnnnnnnnnnnnnnnnnnnnnnnnnnnnnnnnnnnnnnnnnnnnnnnnnnnnnnnnnnnnnnnnnnnnnnnnnnnnnnnnnnnnnnnnnnnnnnnnnnnnnnnnnnnnnnnnnnnnnnnnnnnnnnnnnnnnnnnnnnnnnnnnnnnnnnnnnnnnnnnnnnnnnnnnnnnnnnnnnnnnnnnnnnnnnnnnnnnnnnnnnnnnnnnnnnnnnnnnnnnnnnnnnnnnnnnnnnnnnnnnnnnnnnnnnnnnnnnnnnnnnnnnnnnnnnnnnnnnnnnnnnnnnnnnnnnnnnnnnnnnnnnnnnnnnnnnnnnnnnnnnnnnnnnnnnnnnnnnnnnnnnnnnnnnnnnnnnnnnnnnnnnnnnnnnnnnnnnnnnnnnnnnnnnnnnnnnnnnnnnnnnnnnnnnnnnnnnnnnnnnnnnnnnnnnnnnnnnnnnnnnnnnnnnnnnnnnnnnnnnnnnnnnnnnnnnnnnnnnnnnnnnnnnnnnnnnnnnnnnnnnnnnnnnnnnnnnnnnnnnnnnnnnnnnnnnnnnnnnnnnnnnnnnnnnnnnnnnnnnnnnnnnnnnnnnnnnnnnnnnnnnnnnnnnnnnnnnnnnnnnnnnnnnnnnnnnnnnnnnnnnnnnnnnnnnnnnnnnnnnnnnnnnnnnnnnnnnnnnnnnnnnnnnnnnnnnnnnnnnnnnnnnnnnnnnnnnnnnnnnnnnnnnnnnnnnnnnnnnnnnnnnnnnnnnnnnnnnnnnnnnnnnnnnnnnnnnnnnnnnnnnnnnnnnnnnnnnnnnnnnnnnnnnnnnnnnnnnnnnnnnnnnnnnnnnnnnnnnnnnnnnnnnnnnnnnnnnnnnnnnnnnnnnnnnnnnnnnnnnnnnnnnnnnnnnnnnnnnnnnnnnnnnnnnnnnnnnnnnnnnnnnnnnnnnnnnnnnnnnnnnnnnnnnnnnnnnnnnnnnnnnnnnnnnnnnnnnnnnnnnnnnnnnnnnnnnnnnnnnnnnnnnnnnnnnnnnnnnnnnnnnnnnnnnnnnnnnnnnnnnnnnnnnnnnnnnnnnnnnnnnnnnnnnnnnnnnnnnnnnnnnnnnnnnnnnnnnnnnnnnnnnnnnnnnnnnnnnnnnnnnnnnnnnnnnnnnnnnnnnnnnnnnnnnnnnnnnnnnnnnnnnnnnnnnnnnnnnnnnnnnnnnnnnnnnnnnnnnnnnnnnnnnnnnnnnnnnnnnnnnnnnnnnnnnnnnnnnnnnnnnnnnnnnnnnnnnnnnnnnnnnnnnnnnnnnnnnnnnnnnnnnnnnnnnnnnnnnnnnnnnnnnnnnnnnnnnnnnnnnnnnnnnnnnnnnnnnnnnnnnnnnnnnnnnnnnnnnnnnnnnnnnnnnnnnnnnnnnnnnnnnnnnnnnnnnnnnnnnnnnnnnnnnnnnnnnnnnnnnnnnnnnnnnnnnnnnnnnnnnnnnnnnnnnnnnnnnnnnnnnnnnnnnnnnnnnnnnnnnnnnnnnnnnnnnnnnnnnnnnnnnnnnnnnnnnnnnnnnnnnnnnnnnnnnnnnnnnnnnnnnnnnnnnnnnnnnnnnnnnnnnnnnnnnnnnnnnnnnnnnnnnnnnnnnnnnnnnnnnnnnnnnnnnnnnnnnnnnnnnnnnnnnnnnnnnnnnnnnnnnnnnnnnnnnnnnnnnnnnnnnnnnnnnnnnnnnnnnnnnnnnnnnnnnnnnnnnnnnnnnnnnnnnnnnnnnnnnnnnnnnnnnnnnnnnnnnnnnnnnnnnnnnnnnnnnnnnnnnnnnnnnnnnnnnnnnnnnnnnnnnnnnnnnnnnnnnnnnnnnnnnnnnnnnnnnnnnnnnnnnnnnnnnnnnnnnnnnnnnnnnnnnnnnnnnnnnnnnnnnnnnnnnnnnnnnnnnnnnnnnnnnnnnnnnnnnnnnnnnnnnnnnnnnnnnnnnnnnnnnnnnnnnnnnnnnnnnnnnnnnnnnnnnnnnnnnnnnnnnnnnnnnnnnnnnnnnnnnnnnnnnnnnnnnnnnnnnnnnnnnnnnnnnnnnnnnnnnnnnnnnnnnnnnnnnnnnnnnnnnnnnnnnnnnnnnnnnnnnnnnnnnnnnnnnnnnnnnnnnnnnnnnnnnnnnnnnnnnnnnnnnnnnnnnnnnnnnnnnnnnnnnnnnnnnnnnnnnnnnnnnnnnnnnnnnnnnnnnnnnnnnnnnnnnnnnnnnnnnnnnnnnnnnnnnnnnnnnnnnnnnnnnnnnnnnnnnnnnnnnnnnnnnnnnnnnnnnnnnnnnnnnnnnnnnnnnnnnnnnnnnnnnnnnnnnnnnnnnnnnnnnnnnnnnnnnnnnnnnnnnnnnnnnnnnnnnnnnnnnnnnnnnnnnnnnnnnnnnnnnnnnnnnnnnnnnnnnnnnnnnnnnnnnnnnnnnnnnnnnnnnnnnnnnnnnnnnnnnnnnnnnnnnnnnnnnnnnnnnnnnnnnnnnnnnnnnnnnnnnnnnnnnnnnnnnnnnnnnnnnnnnnnnnnnnnnnnnnnnnnnnnnnnnnnnnnnnnnnnnnnnnnnnnnnnnnnnnnnnnnnnnnnnnnnnnnnnnnnnnnnnnnnnnnnnnnnnnnnnnnnnnnnnnnnnnnnnnnnnnnnnnnnnnnnnnnnnnnnnnnnnnnnnnnnnnnnnnnnnnnnnnnnnnnnnnnnnnnnnnnnnnnnnnnnnnnnnnnnnnnnnnnnnnnnnnnnnnnnnnnnnnnnnnnnnnnnnnnnnnnnnnnnnnnnnnnnnnnnnnnnnnnnnnnnnnnnnnnnnnnnnnnnnnnnnnnnnnnnnnnnnnnnnnnnnnnnnnnnnnnnnnnnnnnnnnnnnnnnnnnnnnnnnnnnnnnnnnnnnnnnnnnnnnnnnnnnnnnnnnnnnnnnnnnnnnnnnnnnnnnnnnnnnnnnnnnnnnnnnnnnnnnnnnnnnnnnnnnnnnnnnnnnnnnnnnnnnnnnnnnnnnnnnnnnnnnnnnnnnnnnnnnnnnnnnnnnnnnnnnnnnnnnnnnnnnnnnnnnnnnnnnnnnnnnnnnnnnnnnnnnnnnnnnnnnnnnnnnnnnnnnnnnnnnnnnnnnnnnnnnnnnnnnnnnnnnnnnnnnnnnnnnnnnnnnnnnnnnnnnnnnnnnnnnnnnnnnnnnnnnnnnnnnnnnnnnnnnnnnnnnnnnnnnnnnnnnnnnnnnnnnnnnnnnnnnnnnnnnnnnnnnnnnnnnnnnnnnnnnnnnnnnnnnnnnnnnnnnnnnnnnnnnnnnnnnnnnnnnnnnnnnnnnnnnnnnnnnnnnnnnnnnnnnnnnnnnnnnnnnnnnnnnnnnnnnnnnnnnnnnnnnnnnnnnnnnnnnnnnnnnnnnnnnnnnnnnnnnnnnnnnnnnnnnnnnnnnnnnnnnnnnnnnnnnnnnnnnnnnnnnnnnnnnnnnnnnnnnnnnnnnnnnnnnnnnnnnnnnnnnnnnnnnnnnnnnnnnnnnnnnnnnnnnnnnnnnnnnnnnnnnnnnnnnnnnnnnnnnnnnnnnnnnnnnnnnnnnnnnnnnnnnnnnnnnnnnnnnnnnnnnnnnnnnnnnnnnnnnnnnnnnnnnnnnnnnnnnnnnnnnnnnnnnnnnnnnnnnnnnnnnnnnnnnnnnnnnnnnnnnnnnnnnnnnnnnnnnnnnnnnnnnnnnnnnnnnnnnnnnnnnnnnnnnnnnnnnnnnnnnnnnnnnnnnnnnnnnnnnnnnnnnnnnnnnnnnnnnnnnnnnnnnnnnnnnnnnnnnnnnnnnnnnnnnnnnnnnnnnnnnnnnnnnnnnnnnnnnnnnnnnnnnnnnnnnnnnnnnnnnnnnnnnnnnnnnnnnnnnnnnnnnnnnnnnnnnnnnnnnnnnnnnnnnnnnnnnnnnnnnnnnnnnnnnnnnnnnnnnnnnnnnnnnnnnnnnnnnnnnnnnnnnnnnnnnnnnnnnnnnnnnnnnnnnnnnnnnnnnnnnnnnnnnnnnnnnnnnnnnnnnnnnnnnnnnnnnnnnnnnnnnnnnnnnnnnnnnnnnnnnnnnnnnnnnnnnnnnnnnnnnnnnnnnnnnnnnnnnnnnnnnnnnnnnnnnnnnnnnnnnnnnnnnnnnnnnnnnnnnnnnnnnnnnnnnnnnnnnnnnnnnnnnnnnnnnnnnnnnnnnnnnnnnnnnnnnnnnnnnnnnnnnnnnnnnnnnnnnnnnnnnnnnnnnnnnnnnnnnnnnnnnnnnnnnnnnnnnnnnnnnnnnnnnnnnnnnnnnnnnnnnnnnnnnnnnnnnnnnnnnnnnnnnnnnnnnnnnnnnnnnnnnnnnnnnnnnnnnnnnnnnnnnnnnnnnnnnnnnnnnnnnnnnnnnnnnnnnnnnnnnnnnnnnnnnnnnnnnnnnnnnnnnnnnnnnnnnnnnnnnnnnnnnnnnnnnnnnnnnnnnnnnnnnnnnnnnnnnnnnnnnnnnnnnnnnnnnnnnnnnnnnnnnnnnnnnnnnnnnnnnnnnnnnnnnnnnnnnnnnnnnnnnnnnnnnnnnnnnnnnnnnnnnnnnnnnnnnnnnnnnnnnnnnnnnnnnnnnnnnnnnnnnnnnnnnnnnnnnnnnnnnnnnnnnnnnnnnnnnnnnnnnnnnnnnnnnnnnnnnnnnnnnnnnnnnnnnnnnnnnnnnnnnnnnnnnnnnnnnnnnnnnnnnnnnnnnnnnnnnnnnnnnnnnnnnnnnnnnnnnnnnnnnnnnnnnnnnnnnnnnnnnnnnnnnnnnnnnnnnnnnnnnnnnnnnnnnnnnnnnnnnnnnnnnnnnnnnnnnnnnnnnnnnnnnnnnnnnnnnnnnnnnnnnnnnnnnnnnnnnnnnnnnnnnnnnnnnnnnnnnnnnnnnnnnnnnnnnnnnnnnnnnnnnnnnnnnnnnnnnnnnnnnnnnnnnnnnnnnnnnnnnnnnnnnnnnnnnnnnnnnnnnnnnnnnnnnnnnnnnnnnnnnnnnnnnnnnnnnnnnnnnnnnnnnnnnnnnnnnnnnnnnnnnnnnnnnnnnnnnnnnnnnnnnnnnnnnnnnnnnnnnnnnnnnnnnnnnnnnnnnnnnnnnnnnnnnnnnnnnnnnnnnnnnnnnnnnnnnnnnnnnnnnnnnnnnnnnnnnnnnnnnnnnnnnnnnnnnnnnnnnnnnnnnnnnnnnnnnnnnnnnnnnnnnnnnnnnnnnnnnnnnnnnnnnnnnnnnnnnnnnnnnnnnnnnnnnnnnnnnnnnnnnnnnnnnnnnnnnnnnnnnnnnnnnnnnnnnnnnnnnnnnnnnnnnnnnnnnnnnnnnnnnnnnnnnnnnnnnnnnnnnnnnnnnnnnnnnnnnnnnnnnnnnnnnnnnnnnnnnnnnnnnnnnnnnnnnnnnnnnnnnnnnnnnnnnnnnnnnnnnnnnnnnnnnnnnnnnnnnnnnnnnnnnnnnnnnnnnnnnnnnnnnnnnnnnnnnnnnnnnnnnnnnnnnnnnnnnnnnnnnnnnnnnnnnnnnnnnnnnnnnnnnnnnnnnnnnnnnnnnnnnnnnnnnnnnnnnnnnnnnnnnnnnnnnnnnnnnnnnnnnnnnnnnnnnnnnnnnnnnnnnnnnnnnnnnnnnnnnnnnnnnnnnnnnnnnnnnnnnnnnnnnnnnnnnnnnnnnnnnnnnnnnnnnnnnnnnnnnnnnnnnnnnnnnnnnnnnnnnnnnnnnnnnnnnnnnnnnnnnnnnnnnnnnnnnnnnnnnnnnnnnnnnnnnnnnnnnnnnnnnnnnnnnnnnnnnnnnnnnnnnnnnnnnnnnnnnnnnnnnnnnnnnnnnnnnnnnnnnnnnnnnnnnnnnnnnnnnnnnnnnnnnnnnnnnnnnnnnnnnnnnnnnnnnnnnnnnnnnnnnnnnnnnnnnnnnnnnnnnnnnnnnnnnnnnnnnnnnnnnnnnnnnnnnnnnnnnnnnnnnnnnnnnnnnnnnnnnnnnnnnnnnnnnnnnnnnnnnnnnnnnnnnnnnnnnnnnnnnnnnnnnnnnnnnnnnnnnnnnnnnnnnnnnnnnnnnnnnnnnnnnnnnnnnnnnnnnnnnnnnnnnnnnnnnnnnnnnnnnnnnnnnnnnnnnnnnnnnnnnnnnnnnnnnnnnnnnnnnnnnnnnnnnnnnnnnnnnnnnnnnnnnnnnnnnnnnnnnnnnnnnnnnnnnnnnnnnnnnnnnnnnnnnnnnnnnnnnnnnnnnnnnnnnnnnnnnnnnnnnnnnnnnnnnnnnnnnnnnnnnnnnnnnnnnnnnnnnnnnnnnnnnnnnnnnnnnnnnnnnnnnnnnnnnnnnnnnnnnnnnnnnnnnnnnnnnnnnnnnnnnnnnnnnnnnnnnnnnnnnnnnnnnnnnnnnnnnnnnnnnnnnnnnnnnnnnnnnnnnnnnnnnnnnnnnnnnnnnnnnnnnnnnnnnnnnnnnnnnnnnnnnnnnnnnnnnnnnnnnnnnnnnnnnnnnnnnnnnnnnnnnnnnnnnnnnnnnnnnnnnnnnnnnnnnnnnnnnnnnnnnnnnnnnnnnnnnnnnnnnnnnnnnnnnnnnnnnnnnnnnnnnnnnnnnnnnnnnnnnnnnnnnnnnnnnnnnnnnnnnnnnnnnnnnnnnnnnnnnnnnnnnnnnnnnnnnnnnnnnnnnnnnnnnnnnnnnnnnnnnnnnnnnnnnnnnnnnnnnnnnnnnnnnnnnnnnnnnnnnnnnnnnnnnnnnnnnnnnnnnnnnnnnnnnnnnnnnnnnnnnnnnnnnnnnnnnnnnnnnnnnnnnnnnnnnnnnnnnnnnnnnnnnnnnnnnnnnnnnnnnnnnnnnnnnnnnnnnnnnnnnnnnnnnnnnnnnnnnnnnnnnnnnnnnnnnnnnnnnnnnnnnnnnnnnnnnnnnnnnnnnnnnnnnnnnnnnnnnnnnnnnnnnnnnnnnnnnnnnnnnnnnnnnnnnnnnnnnnnnnnnnnnnnnnnnnnnnnnnnnnnnnnnnnnnnnnnnnnnnnnnnnnnnnnnnnnnnnnnnnnnnnnnnnnnnnnnnnnnnnnnnnnnnnnnnnnnnnnnnnnnnnnnnnnnnnnnnnnnnnnnnnnnnnnnnnnnnnnnnnnnnnnnnnnnnnnnnnnnnnnnnnnnnnnnnnnnnnnnnnnnnnnnnnnnnnnnnnnnnnnnnnnnnnnnnnnnnnnnnnnnnnnnnnnnnnnnnnnnnnnnnnnnnnnnnnnnnnnnnnnnnnnnnnnnnnnnnnnnnnnnnnnnnnnnnnnnnnnnnnnnnnnnnnnnnnnnnnnnnnnnnnnnnnnnnnnnnnnnnnnnnnnnnnnnnnnnnnnnnnnnnnnnnnnnnnnnnnnnnnnnnnnnnnnnnnnnnnnnnnnnnnnnnnnnnnnnnnnnnnnnnnnnnnnnnnnnnnnnnnnnnnnnnnnnnnnnnnnnnnnnnnnnnnnnnnnnnnnnnnnnnnnnnnnnnnnnnnnnnnnnnnnnnnnnnnnnnnnnnnnnnnnnnnnnnnnnnnnnnnnnnnnnnnnnnnnnnnnnnnnnnnnnnnnnnnnnnnnnnnnnnnnnnnnnnnnnnnnnnnnnnnnnnnnnnnnnnnnnnnnnnnnnnnnnnnnnnnnnnnnnnnnnnnnnnnnnnnnnnnnnnnnnnnnnnnnnnnnnnnnnnnnnnnnnnnnnnnnnnnnnnnnnnnnnnnnnnnnnnnnnnnnnnnnnnnnnnnnnnnnnnnnnnnnnnnnnnnnnnnnnnnnnnnnnnnnnnnnnnnnnnnnnnnnnnnnnnnnnnnnnnnnnnnnnnnnnnnnnnnnnnnnnnnnnnnnnnnnnnnnnnnnnnnnnnnnnnnnnnnnnnnnnnnnnnnnnnnnnnnnnnnnnnnnnnnnnnnnnnnnnnnnnnnnnnnnnnnnnnnnnnnnnnnnnnnnnnnnnnnnnnnnnnnnnnnnnnnnnnnnnnnnnnnnnnnnnnnnnnnnnnnnnnnnnnnnnnnnnnnnnnnnnnnnnnnnnnnnnnnnnnnnnnnnnnnnnnnnnnnnnnnnnnnnnnnnnnnnnnnnnnnnnnnnnnnnnnnnnnnnnnnnnnnnnnnnnnnnnnnnnnnnnnnnnnnnnnnnnnnnnnnnnnnnnnnnnnnnnnnnnnnnnnnnnnnnnnnnnnnnnnnnnnnnnnnnnnnnnnnnnnnnnnnnnnnnnnnnnnnnnnnnnnnnnnnnnnnnnnnnnnnnnnnnnnnnnnnnnnnnnnnnnnnnnnnnnnnnnnnnnnnnnnnnnnnnnnnnnnnnnnnnnnnnnnnnnnnnnnnnnnnnnnnnnnnnnnnnnnnnnnnnnnnnnnnnnnnnnnnnnnnnnnnnnnnnnnnnnnnnnnnnnnnnnnnnnnnnnnnnnnnnnnnnnnnnnnnnnnnnnnnnnnnnnnnnnnnnnnnnnnnnnnnnnnnnnnnnnnnnnnnnnnnnnnnnnnnnnnnnnnnnnnnnnnnnnnnnnnnnnnnnnnnnnnnnnnnnnnnnnnnnnnnnnnnnnnnnnnnnnnnnnnnnnnnnnnnnnnnnnnnnnnnnnnnnnnnnnnnnnnnnnnnnnnnnnnnnnnnnnnnnnnnnnnnnnnnnnnnnnnnnnnnnnnnnnnnnnnnnnnnnnnnnnnnnnnnnnnnnnnnnnnnnnnnnnnnnnnnnnnnnnnnnnnnnnnnnnnnnnnnnnnnnnnnnnnnnnnnnnnnnnnnnnnnnnnnnnnnnnnnnnnnnnnnnnnnnnnnnnnnnnnnnnnnnnnnnnnnnnnnnnnnnnnnnnnnnnnnnnnnnnnnnnnnnnnnnnnnnnnnnnnnnnnnnnnnnnnnnnnnnnnnnnnnnnnnnnnnnnnnnnnnnnnnnnnnnnnnnnnnnnnnnnnnnnnnnnnnnnnnnnnnnnnnnnnnnnnnnnnnnnnnnnnnnnnnnnnnnnnnnnnnnnnnnnnnnnnnnnnnnnnnnnnnnnnnnnnnnnnnnnnnnnnnnnnnnnnnnnnnnnnnnnnnnnnnnnnnnnnnnnnnnnnnnnnnnnnnnnnnnnnnnnnnnnnnnnnnnnnnnnnnnnnnnnnnnnnnnnnnnnnnnnnnnnnnnnnnnnnnnnnnnnnnnnnnnnnnnnnnnnnnnnnnnnnnnnnnnnnnnnnnnnnnnnnnnnnnnnnnnnnnnnnnnnnnnnnnnnnnnnnnnnnnnnnnnnnnnnnnnnnnnnnnnnnnnnnnnnnnnnnnnnnnnnnnnnnnnnnnnnnnnnnnnnnnnnnnnnnnnnnnnnnnnnnnnnnnnnnnnnnnnnnnnnnnnnnnnnnnnnnnnnnnnnnnnnnnnnnnnnnnnnnnnnnnnnnnnnnnnnnnnnnnnnnnnnnnnnnnnnnnnnnnnnnnnnnnnnnnnnnnnnnnnnnnnnnnnnnnnnnnnnnnnnnnnnnnnnnnnnnnnnnnnnnnnnnnnnnnnnnnnnnnnnnnnnnnnnnnnnnnnnnnnnnnnnnnnnnnnnnnnnnnnnnnnnnnnnnnnnnnnnnnnnnnnnnnnnnnnnnnnnnnnnnnnnnnnnnnnnnnnnnnnnnnnnnnnnnnnnnnnnnnnnnnnnnnnnnnnnnnnnnnnnnnnnnnnnnnnnnnnnnnnnnnnnnnnnnnnnnnnnnnnnnnnnnnnnnnnnnnnnnnnnnnnnnnnnnnnnnnnnnnnnnnnnnnnnnnnnnnnnnnnnnnnnnnnnnnnnnnnnnnnnnnnnnnnnnnnnnnnnnnnnnnnnnnnnnnnnnnnnnnnnnnnnnnnnnnnnnnnnnnnnnnnnnnnnnnnnnnnnnnnnnnnnnnnnnnnnnnnnnnnnnnnnnnnnnnnnnnnnnnnnnnnnnnnnnnnnnnnnnnnnnnnnnnnnnnnnnnnnnnnnnnnnnnnnnnnnnnnnnnnnnnnnnnnnnnnnnnnnnnnnnnnnnnnnnnnnnnnnnnnnnnnnnnnnnnnnnnnnnnnnnnnnnnnnnnnnnnnnnnnnnnnnnnnnnnnnnnnnnnnnnnnnnnnnnnnnnnnnnnnnnnnnnnnnnnnnnnnnnnnnnnnnnnnnnnnnnnnnnnnnnnnnnnnnnnnnnnnnnnnnnnnnnnnnnnnnnnnnnnnnnnnnnnnnnnnnnnnnnnnnnnnnnnnnnnnnnnnnnnnnnnnnnnnnnnnnnnnnnnnnnnnnnnnnnnnnnnnnnnnnnnnnnnnnnnnnnnnnnnnnnnnnnnnnnnnnnnnnnnnnnnnnnnnnnnnnnnnnnnnnnnnnnnnnnnnnnnnnnnnnnnnnnnnnnnnnnnnnnnnnnnnnnnnnnnnnnnnnnnnnnnnnnnnnnnnnnnnnnnnnnnnnnnnnnnnnnnnnnnnnnnnnnnnnnnnnnnnnnnnnnnnnnnnnnnnnnnnnnnnnnnnnnnnnnnnnnnnnnnnnnnnnnnnnnnnnnnnnnnnnnnnnnnnnnnnnnnnnnnnnnnnnnnnnnnnnnnnnnnnnnnnnnnnnnnnnnnnnnnnnnnnnnnnnnnnnnnnnnnnnnnnnnnnnnnnnnnnnnnnnnnnnnnnnnnnnnnnnnnnnnnnnnnnnnnnnnnnnnnnnnnnnnnnnnnnnnnnnnnnnnnnnnnnnnnnnnnnnnnnnnnnnnnnnnnnnnnnnnnnnnnnnnnnnnnnnnnnnnnnnnnnnnnnnnnnnnnnnnnnnnnnnnnnnnnnnnnnnnnnnnnnnnnnnnnnnnnnnnnnnnnnnnnnnnnnnnnnnnnnnnnnnnnnnnnnnnnnnnnnnnnnnnnnnnnnnnnnnnnnnnnnnnnnnnnnnnnnnnnnnnnnnnnnnnnnnnnnnnnnnnnnnnnnnnnnnnnnnnnnnnnnnnnnnnnnnnnnnnnnnnnnnnnnnnnnnnnnnnnnnnnnnnnnnnnnnnnnnnnnnnnnnnnnnnnnnnnnnnnnnnnnnnnnnnnnnnnnnnnnnnnnnnnnnnnnnnnnnnnnnnnnnnnnnnnnnnnnnnnnnnnnnnnnnnnnnnnnnnnnnnnnnnnnnnnnnnnnnnnnnnnnnnnnnnnnnnnnnnnnnnnnnnnnnnnnnnnnnnnnnnnnnnnnnnnnnnnnnnnnnnnnnnnnnnnnnnnnnnnnnnnnnnnnnnnnnnnnnnnnnnnnnnnnnnnnnnnnnnnnnnnnnnnnnnnnnnnnnnnnnnnnnnnnnnnnnnnnnnnnnnnnnnnnnnnnnnnnnnnnnnnnnnnnnnnnnnnnnnnnnnnnnnnnnnnnnnnnnnnnnnnnnnnnnnnnnnnnnnnnnnnnnnnnnnnnnnnnnnnnnnnnnnnnnnnnnnnnnnnnnnnnnnnnnnnnnnnnnnnnnnnnnnnnnnnnnnnnnnnnnnnnnnnnnnnnnnnnnnnnnnnnnnnnnnnnnnnnnnnnnnnnnnnnnnnnnnnnnnnnnnnnnnnnnnnnnnnnnnnnnnnnnnnnnnnnnnnnnnnnnnnnnnnnnnnnnnnnnnnnnnnnnnnnnnnnnnnnnnnnnnnnnnnnnnnnnnnnnnnnnnnnnnnnnnnnnnnnnnnnnnnnnnnnnnnnnnnnnnnnnnnnnnnnnnnnnnnnnnnnnnnnnnnnnnnnnnnnnnnnnnnnnnnnnnnnnnnnnnnnnnnnnnnnnnnnnnnnnnnnnnnnnnnnnnnnnnnnnnnnnnnnnnnnnnnnnnnnnnnnnnnnnnnnnnnnnnnnnnnnnnnnnnnnnnnnnnnnnnnnnnnnnnnnnnnnnnnnnnnnnnnnnnnnnnnnnnnnnnnnnnnnnnnnnnnnnnnnnnnnnnnnnnnnnnnnnnnnnnnnnnnnnnnnnnnnnnnnnnnnnnnnnnnnnnnnnnnnnnnnnnnnnnnnnnnnnnnnnnnnnnnnnnnnnnnnnnnnnnnnnnnnnnnnnnnnnnnnnnnnnnnnnnnnnnnnnnnnnnnnnnnnnnnnnnnnnnnnnnnnnnnnnnnnnnnnnnnnnnnnnnnnnnnnnnnnnnnnnnnnnnnnnnnnnnnnnnnnnnnnnnnnnnnnnnnnnnnnnnnnnnnnnnnnnnnnnnnnnnnnnnnnnnnnnnnnnnnnnnnnnnnnnnnnnnnnnnnnnnnnnnnnnnnnnnnnnnnnnnnnnnnnnnnnnnnnnnnnnnnnnnnnnnnnnnnnnnnnnnnnnnnnnnnnnnnnnnnnnnnnnnnnnnnnnnnnnnnnnnnnnnnnnnnnnnnnnnnnnnnnnnnnnnnnnnnnnnnnnnnnnnnnnnnnnnnnnnnnnnnnnnnnnnnnnnnnnnnnnnnnnnnnnnnnnnnnnnnnnnnnnnnnnnnnnnnnnnnnnnnnnnnnnnnnnnnnnnnnnnnnnnnnnnnnnnnnnnnnnnnnnnnnnnnnnnnnnnnnnnnnnnnnnnnnnnnnnnnnnnnnnnnnnnnnnnnnnnnnnnnnnnnnnnnnnnnnnnnnnnnnnnnnnnnnnnnnnnnnnnnnnnnnnnnnnnnnnnnnnnnnnnnnnnnnnnnnnnnnnnnnnnnnnnnnnnnnnnnnnnnnnnnnnnnnnnnnnnnnnnnnnnnnnnnnnnnnnnnnnnnnnnnnnnnnnnnnnnnnnnnnnnnnnnnnnnnnnnnnnnnnnnnnnnnnnnnnnnnnnnnnnnnnnnnnnnnnnnnnnnnnnnnnnnnnnnnnnnnnnnnnnnnnnnnnnnnnnnnnnnnnnnnnnnnnnnnnnnnnnnnnnnnnnnnnnnnnnnnnnnnnnnnnnnnnnnnnnnnnnnnnnnnnnnnnnnnnnnnnnnnnnnnnnnnnnnnnnnnnnnnnnnnnnnnnnnnnnnnnnnnnnnnnnnnnnnnnnnnnnnnnnnnnnnnnnnnnnnnnnnnnnnnnnnnnnnnnnnnnnnnnnnnnnnnnnnnnnnnnnnnnnnnnnnnnnnnnnnnnnnnnnnnnnnnnnnnnnnnnnnnnnnnnnnnnnnnnnnnnnnnnnnnnnnnnnnnnnnnnnnnnnnnnnnnnnnnnnnnnnnnnnnnnnnnnnnnnnnnnnnnnnnnnnnnnnnnnnnnnnnnnnnnnnnnnnnnnnnnnnnnnnnnnnnnnnnnnnnnnnnnnnnnnnnnnnnnnnnnnnnnnnnnnnnnnnnnnnnnnnnnnnnnnnnnnnnnnnnnnnnnnnnnnnnnnnnnnnnnnnnnnnnnnnnnnnnnnnnnnnnnnnnnnnnnnnnnnnnnnnnnnnnnnnnnnnnnnnnnnnnnnnnnnnnnnnnnnnnnnnnnnnnnnnnnnnnnnnnnnnnnnnnnnnnnnnnnnnnnnnnnnnnnnnnnnnnnnnnnnnnnnnnnnnnnnnnnnnnnnnnnnnnnnnnnnnnnnnnnnnnnnnnnnnnnnnnnnnnnnnnnnnnnnnnnnnnnnnnnnnnnnnnnnnnnnnnnnnnnnnnnnnnnnnnnnnnnnnnnnnnnnnnnnnnnnnnnnnnnnnnnnnnnnnnnnnnnnnnnnnnnnnnnnnnnnnnnnnnnnnnnnnnnnnnnnnnnnnnnnnnnnnnnnnnnnnnnnnnnnnnnnnnnnnnnnnnnnnnnnnnnnnnnnnnnnnnnnnnnnnnnnnnnnnnnnnnnnnnnnnnnnnnnnnnnnnnnnnnnnnnnnnnnnnnnnnnnnnnnnnnnnnnnnnnnnnnnnnnnnnnnnnnnnnnnnnnnnnnnnnnnnnnnnnnnnnnnnnnnnnnnnnnnnnnnnnnnnnnnnnnnnnnnnnnnnnnnnnnnnnnnnnnnnnnnnnnnnnnnnnnnnnnnnnnnnnnnnnnnnnnnnnnnnnnnnnnnnnnnnnnnnnnnnnnnnnnnnnnnnnnnnnnnnnnnnnnnnnnnnnnnnnnnnnnnnnnnnnnnnnnnnnnnnnnnnnnnnnnnnnnnnnnnnnnnnnnnnnnnnnnnnnnnnnnnnnnnnnnnnnnnnnnnnnnnnnnnnnnnnnnnnnnnnnnnnnnnnnnnnnnnnnnnnnnnnnnnnnnnnnnnnnnnnnnnnnnnnnnnnnnnnnnnnnnnnnnnnnnnnnnnnnnnnnnnnnnnnnnnnnnnnnnnnnnnnnnnnnnnnnnnnnnnnnnnnnnnnnnnnnnnnnnnnnnnnnnnnnnnnnnnnnnnnnnnnnnnnnnnnnnnnnnnnnnnnnnnnnnnnnnnnnnnnnnnnnnnnnnnnnnnnnnnnnnnnnnnnnnnnnnnnnnnnnnnnnnnnnnnnnnnnnnnnnnnnnnnnnnnnnnnnnnnnnnnnnnnnnnnnnnnnnnnnnnnnnnnnnnnnnnnnnnnnnnnnnnnnnnnnnnnnnnnnnnnnnnnnnnnnnnnnnnnnnnnnnnnnnnnnnnnnnnnnnnnnnnnnnnnnnnnnnnnnnnnnnnnnnnnnnnnnnnnnnnnnnnnnnnnnnnnnnnnnnnnnnnnnnnnnnnnnnnnnnnnnnnnnnnnnnnnnnnnnnnnnnnnnnnnnnnnnnnnnnnnnnnnnnnnnnnnnnnnnnnnnnnnnnnnnnnnnnnnnnnnnnnnnnnnnnnnnnnnnnnnnnnnnnnnnnnnnnnnnnnnnnnnnnnnnnnnnnnnnnnnnnnnnnnnnnnnnnnnnnnnnnnnnnnnnnnnnnnnnnnnnnnnnnnnnnnnnnnnnnnnnnnnnnnnnnnnnnnnnnnnnnnnnnnnnnnnnnnnnnnnnnnnnnnnnnnnnnnnnnnnnnnnnnnnnnnnnnnnnnnnnnnnnnnnnnnnnnnnnnnnnnnnnnnnnnnnnnnnnnnnnnnnnnnnnnnnnnnnnnnnnnnnnnnnnnnnnnnnnnnnnnnnnnnnnnnnnnnnnnnnnnnnnnnnnnnnnnnnnnnnnnnnnnnnnnnnnnnnnnnnnnnnnnnnnnnnnnnnnnnnnnnnnnnnnnnnnnnnnnnnnnnnnnnnnnnnnnnnnnnnnnnnnnnnnnnnnnnnnnnnnnnnnnnnnnnnnnnnnnnnnnnnnnnnnnnnnnnnnnnnnnnnnnnnnnnnnnnnnnnnnnnnnnnnnnnnnnnnnnnnnnnnnnnnnnnnnnnnnnnnnnnnnnnnnnnnnnnnnnnnnnnnnnnnnnnnnnnnnnnnnnnnnnnnnnnnnnnnnnnnnnnnnnnnnnnnnnnnnnnnnnnnnnnnnnnnnnnnnnnnnnnnnnnnnnnnnnnnnnnnnnnnnnnnnnnnnnnnnnnnnnnnnnnnnnnnnnnnnnnnnnnnnnnnnnnnnnnnnnnnnnnnnnnnnnnnnnnnnnnnnnnnnnnnnnnnnnnnnnnnnnnnnnnnnnnnnnnnnnnnnnnnnnnnnnnnnnnnnnnnnnnnnnnnnnnnnnnnnnnnnnnnnnnnnnnnnnnnnnnnnnnnnnnnnnnnnnnnnnnnnnnnnnnnnnnnnnnnnnnnnnnnnnnnnnnnnnnnnnnnnnnnnnnnnnnnnnnnnnnnnnnnnnnnnnnnnnnnnnnnnnnnnnnnnnnnnnnnnnnnnnnnnnnnnnnnnnnnnnnnnnnnnnnnnnnnnnnnnnnnnnnnnnnnnnnnnnnnnnnnnnnnnnnnnnnnnnnnnnnnnnnnnnnnnnnnnnnnnnnnnnnnnnnnnnnnnnnnnnnnnnnnnnnnnnnnnnnnnnnnnnnnnnnnnnnnnnnnnnnnnnnnnnnnnnnnnnnnnnnnnnnnnnnnnnnnnnnnnnnnnnnnnnnnnnnnnnnnnnnnnnnnnnnnnnnnnnnnnnnnnnnnnnnnnnnnnnnnnnnnnnnnnnnnnnnnnnnnnnnnnnnnnnnnnnnnnnnnnnnnnnnnnnnnnnnnnnnnnnnnnnnnnnnnnnnnnnnnnnnnnnnnnnnnnnnnnnnnnnnnnnnnnnnnnnnnnnnnnnnnnnnnnnnnnnnnnnnnnnnnnnnnnnnnnnnnnnnnnnnnnnnnnnnnnnnnnnnnnnnnnnnnnnnnnnnnnnnnnnnnnnnnnnnnnnnnnnnnnnnnnnnnnnnnnnnnnnnnnnnnnnnnnnnnnnnnnnnnnnnnnnnnnnnnnnnnnnnnnnnnnnnnnnnnnnnnnnnnnnnnnnnnnnnnnnnnnnnnnnnnnnnnnnnnnnnnnnnnnnnnnnnnnnnnnnnnnnnnnnnnnnnnnnnnnnnnnnnnnnnnnnnnnnnnnnnnnnnnnnnnnnnnnnnnnnnnnnnnnnnnnnnnnnnnnnnnnnnnnnnnnnnnnnnnnnnnnnnnnnnnnnnnnnnnnnnnnnnnnnnnnnnnnnnnnnnnnnnnnnnnnnnnnnnnnnnnnnnnnnnnnnnnnnnnnnnnnnnnnnnnnnnnnnnnnnnnnnnnnnnnnnnnnnnnnnnnnnnnnnnnnnnnnnnnnnnnnnnnnnnnnnnnnnnnnnnnnnnnnnnnnnnnnnnnnnnnnnnnnnnnnnnnnnnnnnnnnnnnnnnnnnnnnnnnnnnnnnnnnnnnnnnnnnnnnnnnnnnnnnnnnnnnnnnnnnnnnnnnnnnnnnnnnnnnnnnnnnnnnnnnnnnnnnnnnnnnnnnnnnnnnnnnnnnnnnnnnnnnnnnnnnnnnnnnnnnnnnnnnnnnnnnnnnnnnnnnnnnnnnnnnnnnnnnnnnnnnnnnnnnnnnnnnnnnnnnnnnnnnnnnnnnnnnnnnnnnnnnnnnnnnnnnnnnnnnnnnnnnnnnnnnnnnnnnnnnnnnnnnnnnnnnnnnnnnnnnnnnnnnnnnnnnnnnnnnnnnnnnnnnnnnnnnnnnnnnnnnnnnnnnnnnnnnnnnnnnnnnnnnnnnnnnnnnnnnnnnnnnnnnnnnnnnnnnnnnnnnnnnnnnnnnnnnnnnnnnnnnnnnnnnnnnnnnnnnnnnnnnnnnnnnnnnnnnnnnnnnnnnnnnnnnnnnnnnnnnnnnnnnnnnnnnnnnnnnnnnnnnnnnnnnnnnnnnnnnnnnnnnnnnnnnnnnnnnnnnnnnnnnnnnnnnnnnnnnnnnnnnnnnnnnnnnnnnnnnnnnnnnnnnnnnnnnnnnnnnnnnnnnnnnnnnnnnnnnnnnnnnnnnnnnnnnnnnnnnnnnnnnnnnnnnnnnnnnnnnnnnnnnnnnnnnnnnnnnnnnnnnnnnnnnnnnnnnnnnnnnnnnnnnnnnnnnnnnnnnnnnnnnnnnnnnnnnnnnnnnnnnnnnnnnnnnnnnnnnnnnnnnnnnnnnnnnnnnnnnnnnnnnnnnnnnnnnnnnnnnnnnnnnnnnnnnnnnnnnnnnnnnnnnnnnnnnnnnnnnnnnnnnnnnnnnnnnnnnnnnnnnnnnnnnnnnnnnnnnnnnnnnnnnnnnnnnnnnnnnnnnnnnnnnnnnnnnnnnnnnnnnnnnnnnnnnnnnnnnnnnnnnnnnnnnnnnnnnnnnnnnnnnnnnnnnnnnnnnnnnnnnnnnnnnnnnnnnnnnnnnnnnnnnnnnnnnnnnnnnnnnnnnnnnnnnnnnnnnnnnnnnnnnnnnnnnnnnnnnnnnnnnnnnnnnnnnnnnnnnnnnnnnnnnnnnnnnnnnnnnnnnnnnnnnnnnnnnnnnnnnnnnnnnnnnnnnnnnnnnnnnnnnnnnnnnnnnnnnnnnnnnnnnnnnnnnnnnnnnnnnnnnnnnnnnnnnnnnnnnnnnnnnnnnnnnnnnnnnnnnnnnnnnnnnnnnnnnnnnnnnnnnnnnnnnnnnnnnnnnnnnnnnnnnnnnnnnnnnnnnnnnnnnnnnnnnnnnnnnnnnnnnnnnnnnnnnnnnnnnnnnnnnnnnnnnnnnnnnnnnnnnnnnnnnnnnnnnnnnnnnnnnnnnnnnnnnnnnnnnnnnnnnnnnnnnnnnnnnnnnnnnnnnnnnnnnnnnnnnnnnnnnnnnnnnnnnnnnnnnnnnnnnnnnnnnnnnnnnnnnnnnnnnnnnnnnnnnnnnnnnnnnnnnnnnnnnnnnnnnnnnnnnnnnnnnnnnnnnnnnnnnnnnnnnnnnnnnnnnnnnnnnnnnnnnnnnnnnnnnnnnnnnnnnnnnnnnnnnnnnnnnnnnnnnnnnnnnnnnnnnnnnnnnnnnnnnnnnnnnnnnnnnnnnnnnnnnnnnnnnnnnnnnnnnnnnnnnnnnnnnnnnnnnnnnnnnnnnnnnnnnnnnnnnnnnnnnnnnnnnnnnnnnnnnnnnnnnnnnnnnnnnnnnnnnnnnnnnnnnnnnnnnnnnnnnnnnnnnnnnnnnnnnnnnnnnnnnnnnnnnnnnnnnnnnnnnnnnnnnnnnnnnnnnnnnnnnnnnnnnnnnnnnnnnnnnnnnnnnnnnnnnnnnnnnnnnnnnnnnnnnnnnnnnnnnnnnnnnnnnnnnnnnnnnnnnnnnnnnnnnnnnnnnnnnnnnnnnnnnnnnnnnnnnnnnnnnnnnnnnnnnnnnnnnnnnnnnnnnnnnnnnnnnnnnnnnnnnnnnnnnnnnnnnnnnnnnnnnnnnnnnnnnnnnnnnnnnnnnnnnnnnnnnnnnnnnnnnnnnnnnnnnnnnnnnnnnnnnnnnnnnnnnnnnnnnnnnnnnnnnnnnnnnnnnnnnnnnnnnnnnnnnnnnnnnnnnnnnnnnnnnnnnnnnnnnnnnnnnnnnnnnnnnnnnnnnnnnnnnnnnnnnnnnnnnnnnnnnnnnnnnnnnnnnnnnnnnnnnnnnnnnnnnnnnnnnnnnnnnnnnnnnnnnnnnnnnnnnnnnnnnnnnnnnnnnnnnnnnnnnnnnnnnnnnnnnnnnnnnnnnnnnnnnnnnnnnnnnnnnnnnnnnnnnnnnnnnnnnnnnnnnnnnnnnnnnnnnnnnnnnnnnnnnnnnnnnnnnnnnnnnnnnnnnnnnnnnnnnnnnnnnnnnnnnnnnnnnnnnnnnnnnnnnnnnnnnnnnnnnnnnnnnnnnnnnnnnnnnnnnnnnnnnnnnnnnnnnnnnnnnnnnnnnnnnnnnnnnnnnnnnnnnnnnnnnnnnnnnnnnnnnnnnnnnnnnnnnnnnnnnnnnnnnnnnnnnnnnnnnnnnnnnnnnnnnnnnnnnnnnnnnnnnnnnnnnnnnnnnnnnnnnnnnnnnnnnnnnnnnnnnnnnnnnnnnnnnnnnnnnnnnnnnnnnnnnnnnnnnnnnnnnnnnnnnnnnnnnnnnnnnnnnnnnnnnnnnnnnnnnnnnnnnnnnnnnnnnnnnnnnnnnnnnnnnnnnnnnnnnnnnnnnnnnnnnnnnnnnnnnnnnnnnnnnnnnnnnnnnnnnnnnnnnnnnnnnnnnnnnnnnnnnnnnnnnnnnnnnnnnnnnnnnnnnnnnnnnnnnnnnnnnnnnnnnnnnnnnnnnnnnnnnnnnnnnnnnnnnnnnnnnnnnnnnnnnnnnnnnnnnnnnnnnnnnnnnnnnnnnnnnnnnnnnnnnnnnnnnnnnnnnnnnnnnnnnnnnnnnnnnnnnnnnnnnnnnnnnnnnnnnnnnnnnnnnnnnnnnnnnnnnnnnnnnnnnnnnnnnnnnnnnnnnnnnnnnnnnnnnnnnnnnnnnnnnnnnnnnnnnnnnnnnnnnnnnnnnnnnnnnnnnnnnnnnnnnnnnnnnnnnnnnnnnnnnnnnnnnnnnnnnnnnnnnnnnnnnnnnnnnnnnnnnnnnnnnnnnnnnnnnnnnnnnnnnnnnnnnnnnnnnnnnnnnnnnnnnnnnnnnnnnnnnnnnnnnnnnnnnnnnnnnnnnnnnnnnnnnnnnnnnnnnnnnnnnnnnnnnnnnnnnnnnnnnnnnnnnnnnnnnnnnnnnnnnnnnnnnnnnnnnnnnnnnnnnnnnnnnnnnnnnnnnnnnnnnnnnnnnnnnnnnnnnnnnnnnnnnnnnnnnnnnnnnnnnnnnnnnnnnnnnnnnnnnnnnnnnnnnnnnnnnnnnnnnnnnnnnnnnnnnnnnnnnnnnnnnnnnnnnnnnnnnnnnnnnnnnnnnnnnnnnnnnnnnnnnnnnnnnnnnnnnnnnnnnnnnnnnnnnnnnnnnnnnnnnnnnnnnnnnnnnnnnnnnnnnnnnnnnnnnnnnnnnnnnnnnnnnnnnnnnnnnnnnnnnnnnnnnnnnnnnnnnnnnnnnnnnnnnnnnnnnnnnnnnnnnnnnnnnnnnnnnnnnnnnnnnnnnnnnnnnnnnnnnnnnnnnnnnnnnnnnnnnnnnnnnnnnnnnnnnnnnnnnnnnnnnnnnnnnnnnnnnnnnnnnnnnnnnnnnnnnnnnnnnnnnnnnnnnnnnnnnnnnnnnnnnnnnnnnnnnnnnnnnnnnnnnnnnnnnnnnnnnnnnnnnnnnnnnnnnnnnnnnnnnnnnnnnnnnnnnnnnnnnnnnnnnnnnnnnnnnnnnnnnnnnnnnnnnnnnnnnnnnnnnnnnnnnnnnnnnnnnnnnnnnnnnnnnnnnnnnnnnnnnnnnnnnnnnnnnnnnnnnnnnnnnnnnnnnnnnnnnnnnnnnnnnnnnnnnnnnnnnnnnnnnnnnnnnnnnnnnnnnnnnnnnnnnnnnnnnnnnnnnnnnnnnnnnnnnnnnnnnnnnnnnnnnnnnnnnnnnnnnnnnnnnnnnnnnnnnnnnnnnnnnnnnnnnnnnnnnnnnnnnnnnnnnnnnnnnnnnnnnnnnnnnnnnnnnnnnnnnnnnnnnnnnnnnnnnnnnnnnnnnnnnnnnnnnnnnnnnnnnnnnnnnnnnnnnnnnnnnnnnnnnnnnnnnnnnnnnnnnnnnnnnnnnnnnnnnnnnnnnnnnnnnnnnnnnnnnnnnnnnnnnnnnnnnnnnnnnnnnnnnnnnnnnnnnnnnnnnnnnnnnnnnnnnnnnnnnnnnnnnnnnnnnnnnnnnnnnnnnnnnnnnnnnnnnnnnnnnnnnnnnnnnnnnnnnnnnnnnnnnnnnnnnnnnnnnnnnnnnnnnnnnnnnnnnnnnnnnnnnnnnnnnnnnnnnnnnnnnnnnnnnnnnnnnnnnnnnnnnnnnnnnnnnnnnnnnnnnnnnnnnnnnnnnnnnnnnnnnnnnnnnnnnnnnnnnnnnnnnnnnnnnnnnnnnnnnnnnnnnnnnnnnnnnnnnnnnnnnnnnnnnnnnnnnnnnnnnnnnnnnnnnnnnnnnnnnnnnnnnnnnnnnnnnnnnnnnnnnnnnnnnnnnnnnnnnnnnnnnnnnnnnnnnnnnnnnnnnnnnnnnnnnnnnnnnnnnnnnnnnnnnnnnnnnnnnnnnnnnnnnnnnnnnnnnnnnnnnnnnnnnnnnnnnnnnnnnnnnnnnnnnnnnnnnnnnnnnnnnnnnnnnnnnnnnnnnnnnnnnnnnnnnnnnnnnnnnnnnnnnnnnnnnnnnnnnnnnnnnnnnnnnnnnnnnnnnnnnnnnnnnnnnnnnnnnnnnnnnnnnnnnnnnnnnnnnnnnnnnnnnnnnnnnnnnnnnnnnnnnnnnnnnnnnnnnnnnnnnnnnnnnnnnnnnnnnnnnnnnnnnnnnnnnnnnnnnnnnnnnnnnnnnnnnnnnnnnnnnnnnnnnnnnnnnnnnnnnnnnnnnnnnnnnnnnnnnnnnnnnnnnnnnnnnnnnnnnnnnnnnnnnnnnnnnnnnnnnnnnnnnnnnnnnnnnnnnnnnnnnnnnnnnnnnnnnnnnnnnnnnnnnnnnnnnnnnnnnnnnnnnnnnnnnnnnnnnnnnnnnnnnnnnnnnnnnnnnnnnnnnnnnnnnnnnnnnnnnnnnnnnnnnnnnnnnnnnnnnnnnnnnnnnnnnnnnnnnnnnnnnnnnnnnnnnnnnnnnnnnnnnnnnnnnnnnnnnnnnnnnnnnnnnnnnnnnnnnnnnnnnnnnnnnnnnnnnnnnnnnnnnnnnnnnnnnnnnnnnnnnnnnnnnnnnnnnnnnnnnnnnnnnnnnnnnnnnnnnnnnnnnnnnnnnnnnnnnnnnnnnnnnnnnnnnnnnnnnnnnnnnnnnnnnnnnnnnnnnnnnnnnnnnnnnnnnnnnnnnnnnnnnnnnnnnnnnnnnnnnnnnnnnnnnnnnnnnnnnnnnnnnnnnnnnnnnnnnnnnnnnnnnnnnnnnnnnnnnnnnnnnnnnnnnnnnnnnnnnnnnnnnnnnnnnnnnnnnnnnnnnnnnnnnnnnnnnnnnnnnnnnnnnnnnnnnnnnnnnnnnnnnnnnnnnnnnnnnnnnnnnnnnnnnnnnnnnnnnnnnnnnnnnnnnnnnnnnnnnnnnnnnnnnnnnnnnnnnnnnnnnnnnnnnnnnnnnnnnnnnnnnnnnnnnnnnnnnnnnnnnnnnnnnnnnnnnnnnnnnnnnnnnnnnnnnnnnnnnnnnnnnnnnnnnnnnnnnnnnnnnnnnnnnnnnnnnnnnnnnnnnnnnnnnnnnnnnnnnnnnnnnnnnnnnnnnnnnnnnnnnnnnnnnnnnnnnnnnnnnnnnnnnnnnnnnnnnnnnnnnnnnnnnnnnnnnnnnnnnnnnnnnnnnnnnnnnnnnnnnnnnnnnnnnnnnnnnnnnnnnnnnnnnnnnnnnnnnnnnnnnnnnnnnnnnnnnnnnnnnnnnnnnnnnnnnnnnnnnnnnnnnnnnnnnnnnnnnnnnnnnnnnnnnnnnnnnnnnnnnnnnnnnnnnnnnnnnnnnnnnnnnnnnnnnnnnnnnnnnnnnnnnnnnnnnnnnnnnnnnnnnnnnnnnnnnnnnnnnnnnnnnnnnnnnnnnnnnnnnnnnnnnnnnnnnnnnnnnnnnnnnnnnnnnnnnnnnnnnnnnnnnnnnnnnnnnnnnnnnnnnnnnnnnnnnnnnnnnnnnnnnnnnnnnnnnnnnnnnnnnnnnnnnnnnnnnnnnnnnnnnnnnnnnnnnnnnnnnnnnnnnnnnnnnnnnnnnnnnnnnnnnnnnnnnnnnnnnnnnnnnnnnnnnnnnnnnnnnnnnnnnnnnnnnnnnnnnnnnnnnnnnnnnnnnnnnnnnnnnnnnnnnnnnnnnnnnnnnnnnnnnnnnnnnnnnnnnnnnnnnnnnnnnnnnnnnnnnnnnnnnnnnnnnnnnnnnnnnnnnnnnnnnnnnnnnnnnnnnnnnnnnnnnnnnnnnnnnnnnnnnnnnnnnnnnnnnnnnnnnnnnnnnnnnnnnnnnnnnnnnnnnnnnnnnnnnnnnnnnnnnnnnnnnnnnnnnnnnnnnnnnnnnnnnnnnnnnnnnnnnnnnnnnnnnnnnnnnnnnnnnnnnnnnnnnnnnnnnnnnnnnnnnnnnnnnnnnnnnnnnnnnnnnnnnnnnnnnnnnnnnnnnnnnnnnnnnnnnnnnnnnnnnnnnnnnnnnnnnnnnnnnnnnnnnnnnnnnnnnnnnnnnnnnnnnnnnnnnnnnnnnnnnnnnnnnnnnnnnnnnnnnnnnnnnnnnnnnnnnnnnnnnnnnnnnnnnnnnnnnnnnnnnnnnnnnnnnnnnnnnnnnnnnnnnnnnnnnnnnnnnnnnnnnnnnnnnnnnnnnnnnnnnnnnnnnnnnnnnnnnnnnnnnnnnnnnnnnnnnnnnnnnnnnnnnnnnnnnnnnnnnnnnnnnnnnnnnnnnnnnnnnnnnnnnnnnnnnnnnnnnnnnnnnnnnnnnnnnnnnnnnnnnnnnnnnnnnnnnnnnnnnnnnnnnnnnnnnnnnnnnnnnnnnnnnnnnnnnnnnnnnnnnnnnnnnnnnnnnnnnnnnnnnnnnnnnnnnnnnnnnnnnnnnnnnnnnnnnnnnnnnnnnnnnnnnnnnnnnnnnnnnnnnnnnnnnnnnnnnnnnnnnnnnnnnnnnnnnnnnnnnnnnnnnnnnnnnnnnnnnnnnnnnnnnnnnnnnnnnnnnnnnnnnnnnnnnnnnnnnnnnnnnnnnnnnnnnnnnnnnnnnnnnnnnnnnnnnnnnnnnnnnnnnnnnnnnnnnnnnnnnnnnnnnnnnnnnnnnnnnnnnnnnnnnnnnnnnnnnnnnnnnnnnnnnnnnnnnnnnnnnnnnnnnnnnnnnnnnnnnnnnnnnnnnnnnnnnnnnnnnnnnnnnnnnnnnnnnnnnnnnnnnnnnnnnnnnnnnnnnnnnnnnnnnnnnnnnnnnnnnnnnnnnnnnnnnnnnnnnnnnnnnnnnnnnnnnnnnnnnnnnnnnnnnnnnnnnnnnnnnnnnnnnnnnnnnnnnnnnnnnnnnnnnnnnnnnnnnnnnnnnnnnnnnnnnnnnnnnnnnnnnnnnnnnnnnnnnnnnnnnnnnnnnnnnnnnnnnnnnnnnnnnnnnnnnnnnnnnnnnnnnnnnnnnnnnnnnnnnnnnnnnnnnnnnnnnnnnnnnnnnnnnnnnnnnnnnnnnnnnnnnnnnnnnnnnnnnnnnnnnnnnnnnnnnnnnnnnnnnnnnnnnnnnnnnnnnnnnnnnnnnnnnnnnnnnnnnnnnnnnnnnnnnnnnnnnnnnnnnnnnnnnnnnnnnnnnnnnnnnnnnnnnnnnnnnnnnnnnnnnnnnnnnnnnnnnnnnnnnnnnnnnnnnnnnnnnnnnnnnnnnnnnnnnnnnnnnnnnnnnnnnnnnnnnnnnnnnnnnnnnnnnnnnnnnnnnnnnnnnnnnnnnnnnnnnnnnnnnnnnnnnnnnnnnnnnnnnnnnnnnnnnnnnnnnnnnnnnnnnnnnnnnnnnnnnnnnnnnnnnnnnnnnnnnnnnnnnnnnnnnnnnnnnnnnnnnnnnnnnnnnnnnnnnnnnnnnnnnnnnnnnnnnnnnnnnnnnnnnnnnnnnnnnnnnnnnnnnnnnnnnnnnnnnnnnnnnnnnnnnnnnnnnnnnnnnnnnnnnnnnnnnnnnnnnnnnnnnnnnnnnnnnnnnnnnnnnnnnnnnnnnnnnnnnnnnnnnnnnnnnnnnnnnnnnnnnnnnnnnnnnnnnnnnnnnnnnnnnnnnnnnnnnnnnnnnnnnnnnnnnnnnnnnnnnnnnnnnnnnnnnnnnnnnnnnnnnnnnnnnnnnnnnnnnnnnnnnnnnnnnnnnnnnnnnnnnnnnnnnnnnnnnnnnnnnnnnnnnnnnnnnnnnnnnnnnnnnnnnnnnnnnnnnnnnnnnnnnnnnnnnnnnnnnnnnnnnnnnnnnnnnnnnnnnnnnnnnnnnnnnnnnnnnnnnnnnnnnnnnnnnnnnnnnnnnnnnnnnnnnnnnnnnnnnnnnnnnnnnnnnnnnnnnnnnnnnnnnnnnnnnnnnnnnnnnnnnnnnnnnnnnnnnnnnnnnnnnnnnnnnnnnnnnnnnnnnnnnnnnnnnnnnnnnnnnnnnnnnnnnnnnnnnnnnnnnnnnnnnnnnnnnnnnnnnnnnnnnnnnnnnnnnnnnnnnnnnnnnnnnnnnnnnnnnnnnnnnnnnnnnnnnnnnnnnnnnnnnnnnnnnnnnnnnnnnnnnnnnnnnnnnnnnnnnnnnnnnnnnnnnnnnnnnnnnnnnnnnnnnnnnnnnnnnnnnnnnnnnnnnnnnnnnnnnnnnnnnnnnnnnnnnnnnnnnnnnnnnnnnnnnnnnnnnnnnnnnnnnnnnnnnnnnnnnnnnnnnnnnnnnnnnnnnnnnnnnnnnnnnnnnnnnnnnnnnnnnnnnnnnnnnnnnnnnnnnnnnnnnnnnnnnnnnnnnnnnnnnnnnnnnnnnnnnnnnnnnnnnnnnnnnnnnnnnnnnnnnnnnnnnnnnnnnnnnnnnnnnnnnnnnnnnnnnnnnnnnnnnnnnnnnnnnnnnnnnnnnnnnnnnnnnnnnnnnnnnnnnnnnnnnnnnnnnnnnnnnnnnnnnnnnnnnnnnnnnnnnnnnnnnnnnnnnnnnnnnnnnnnnnnnnnnnnnnnnnnnnnnnnnnnnnnnnnnnnnnnnnnnnnnnnnnnnnnnnnnnnnnnnnnnnnnnnnnnnnnnnnnnnnnnnnnnnnnnnnnnnnnnnnnnnnnnnnnnnnnnnnnnnnnnnnnnnnnnnnnnnnnnnnnnnnnnnnnnnnnnnnnnnnnnnnnnnnnnnnnnnnnnnnnnnnnnnnnnnnnnnnnnnnnnnnnnnnnnnnnnnnnnnnnnnnnnnnnnnnnnnnnnnnnnnnnnnnnnnnnnnnnnnnnnnnnnnnnnnnnnnnnnnnnnnnnnnnnnnnnnnnnnnnnnnnnnnnnnnnnnnnnnnnnnnnnnnnnnnnnnnnnnnnnnnnnnnnnnnnnnnnnnnnnnnnnnnnnnnnnnnnnnnnnnnnnnnnnnnnnnnnnnnnnnnnnnnnnnnnnnnnnnnnnnnnnnnnnnnnnnnnnnnnnnnnnnnnnnnnnnnnnnnnnnnnnnnnnnnnnnnnnnnnnnnnnnnnnnnnnnnnnnnnnnnnnnnnnnnnnnnnnnnnnnnnnnnnnnnnnnnnnnnnnnnnnnnnnnnnnnnnnnnnnnnnnnnnnnnnnnnnnnnnnnnnnnnnnnnnnnnnnnnnnnnnnnnnnnnnnnnnnnnnnnnnnnnnnnnnnnnnnnnnnnnnnnnnnnnnnnnnnnnnnnnnnnnnnnnnnnnnnnnnnnnnnnnnnnnnnnnnnnnnnnnnnnnnnnnnnnnnnnnnnnnnnnnnnnnnnnnnnnnnnnnnnnnnnnnnnnnnnnnnnnnnnnnnnnnnnnnnnnnnnnnnnnnnnnnnnnnnnnnnnnnnnnnnnnnnnnnnnnnnnnnnnnnnnnnnnnnnnnnnnnnnnnnnnnnnnnnnnnnnnnnnnnnnnnnnnnnnnnnnnnnnnnnnnnnnnnnnnnnnnnnnnnnnnnnnnnnnnnnnnnnnnnnnnnnnnnnnnnnnnnnnnnnnnnnnnnnnnnnnnnnnnnnnnnnnnnnnnnnnnnnnnnnnnnnnnnnnnnnnnnnnnnnnnnnnnnnnnnnnnnnnnnnnnnnnnnnnnnnnnnnnnnnnnnnnnnnnnnnnnnnnnnnnnnnnnnnnnnnnnnnnnnnnnnnnnnnnnnnnnnnnnnnnnnnnnnnnnnnnnnnnnnnnnnnnnnnnnnnnnnnnnnnnnnnnnnnnnnnnnnnnnnnnnnnnnnnnnnnnnnnnnnnnnnnnnnnnnnnnnnnnnnnnnnnnnnnnnnnnnnnnnnnnnnnnnnnnnnnnnnnnnnnnnnnnnnnnnnnnnnnnnnnnnnnnnnnnnnnnnnnnnnnnnnnnnnnnnnnnnnnnnnnnnnnnnnnnnnnnnnnnnnnnnnnnnnnnnnnnnnnnnnnnnnnnnnnnnnnnnnnnnnnnnnnnnnnnnnnnnnnnnnnnnnnnnnnnnnnnnnnnnnnnnnnnnnnnnnnnnnnnnnnnnnnnnnnnnnnnnnnnnnnnnnnnnnnnnnnnnnnnnnnnnnnnnnnnnnnnnnnnnnnnnnnnnnnnnnnnnnnnnnnnnnnnnnnnnnnnnnnnnnnnnnnnnnnnnnnnnnnnnnnnnnnnnnnnnnnnnnnnnnnnnnnnnnnnnnnnnnnnnnnnnnnnnnnnnnnnnnnnnnnnnnnnnnnnnnnnnnnnnnnnnnnnnnnnnnnnnnnnnnnnnnnnnnnnnnnnnnnnnnnnnnnnnnnnnnnnnnnnnnnnnnnnnnnnnnnnnnnnnnnnnnnnnnnnnnnnnnnnnnnnnnnnnnnnnnnnnnnnnnnnnnnnnnnnnnnnnnnnnnnnnnnnnnnnnnnnnnnnnnnnnnnnnnnnnnnnnnnnnnnnnnnnnnnnnnnnnnnnnnnnnnnnnnnnnnnnnnnnnnnnnnnnnnnnnnnnnnnnnnnnnnnnnnnnnnnnnnnnnnnnnnnnnnnnnnnnnnnnnnnnnnnnnnnnnnnnnnnnnnnnnnnnnnnnnnnnnnnnnnnnnnnnnnnnnnnnnnnnnnnnnnnnnnnnnnnnnnnnnnnnnnnnnnnnnnnnnnnnnnnnnnnnnnnnnnnnnnnnnnnnnnnnnnnnnnnnnnnnnnnnnnnnnnnnnnnnnnnnnnnnnnnnnnnnnnnnnnnnnnnnnnnnnnnnnnnnnnnnnnnnnnnnnnnnnnnnnnnnnnnnnnnnnnnnnnnnnnnnnnnnnnnnnnnnnnnnnnnnnnnnnnnnnnnnnnnnnnnnnnnnnnnnnnnnnnnnnnnnnnnnnnnnnnnnnnnnnnnnnnnnnnnnnnnnnnnnnnnnnnnnnnnnnnnnnnnnnnnnnnnnnnnnnnnnnnnnnnnnnnnnnnnnnnnnnnnnnnnnnnnnnnnnnnnnnnnnnnnnnnnnnnnnnnnnnnnnnnnnnnnnnnnnnnnnnnnnnnnnnnnnnnnnnnnnnnnnnnnnnnnnnnnnnnnnnnnnnnnnnnnnnnnnnnnnnnnnnnnnnnnnnnnnnnnnnnnnnnnnnnnnnnnnnnnnnnnnnnnnnnnnnnnnnnnnnnnnnnnnnnnnnnnnnnnnnnnnnnnnnnnnnnnnnnnnnnnnnnnnnnnnnnnnnnnnnnnnnnnnnnnnnnnnnnnnnnnnnnnnnnnnnnnnnnnnnnnnnnnnnnnnnnnnnnnnnnnnnnnnnnnnnnnnnnnnnnnnnnnnnnnnnnnnnnnnnnnnnnnnnnnnnnnnnnnnnnnnnnnnnnnnnnnnnnnnnnnnnnnnnnnnnnnnnnnnnnnnnnnnnnnnnnnnnnnnnnnnnnnnnnnnnnnnnnnnnnnnnnnnnnnnnnnnnnnnnnnnnnnnnnnnnnnnnnnnnnnnnnnnnnnnnnnnnnnnnnnnnnnnnnnnnnnnnnnnnnnnnnnnnnnnnnnnnnnnnnnnnnnnnnnnnnnnnnnnnnnnnnnnnnnnnnnnnnnnnnnnnnnnnnnnnnnnnnnnnnnnnnnnnnnnnnnnnnnnnnnnnnnnnnnnnnnnnnnnnnnnnnnnnnnnnnnnnnnnnnnnnnnnnnnnnnnnnnnnnnnnnnnnnnnnnnnnnnnnnnnnnnnnnnnnnnnnnnnnnnnnnnnnnnnnnnnnnnnnnnnnnnnnnnnnnnnnnnnnnnnnnnnnnnnnnnnnnnnnnnnnnnnnnnnnnnnnnnnnnnnnnnnnnnnnnnnnnnnnnnnnnnnnnnnnnnnnnnnnnnnnnnnnnnnnnnnnnnnnnnnnnnnnnnnnnnnnnnnnnnnnnnnnnnnnnnnnnnnnnnnnnnnnnnnnnnnnnnnnnnnnnnnnnnnnnnnnnnnnnnnnnnnnnnnnnnnnnnnnnnnnnnnnnnnnnnnnnnnnnnnnnnnnnnnnnnnnnnnnnnnnnnnnnnnnnnnnnnnnnnnnnnnnnnnnnnnnnnnnnnnnnnnnnnnnnnnnnnnnnnnnnnnnnnnnnnnnnnnnnnnnnnnnnnnnnnnnnnnnnnnnnnnnnnnnnnnnnnnnnnnnnnnnnnnnnnnnnnnnnnnnnnnnnnnnnnnnnnnnnnnnnnnnnnnnnnnnnnnnnnnnnnnnnnnnnnnnnnnnnnnnnnnnnnnnnnnnnnnnnnnnnnnnnnnnnnnnnnnnnnnnnnnnnnnnnnnnnnnnnnnnnnnnnnnnnnnnnnnnnnnnnnnnnnnnnnnnnnnnnnnnnnnnnnnnnnnnnnnnnnnnnnnnnnnnnnnnnnnnnnnnnnnnnnnnnnnnnnnnnnnnnnnnnnnnnnnnnnnnnnnnnnnnnnnnnnnnnnnnnnnnnnnnnnnnnnnnnnnnnnnnnnnnnnnnnnnnnnnnnnnnnnnnnnnnnnnnnnnnnnnnnnnnnnnnnnnnnnnnnnnnnnnnnnnnnnnnnnnnnnnnnnnnnnnnnnnnnnnnnnnnnnnnnnnnnnnnnnnnnnnnnnnnnnnnnnnnnnnnnnnnnnnnnnnnnnnnnnnnnnnnnnnnnnnnnnnnnnnnnnnnnnnnnnnnnnnnnnnnnnnnnnnnnnnnnnnnnnnnnnnnnnnnnnnnnnnnnnnnnnnnnnnnnnnnnnnnnnnnnnnnnnnnnnnnnnnnnnnnnnnnnnnnnnnnnnnnnnnnnnnnnnnnnnnnnnnnnnnnnnnnnnnnnnnnnnnnnnnnnnnnnnnnnnnnnnnnnnnnnnnnnnnnnnnnnnnnnnnnnnnnnnnnnnnnnnnnnnnnnnnnnnnnnnnnnnnnnnnnnnnnnnnnnnnnnnnnnnnnnnnnnnnnnnnnnnnnnnnnnnnnnnnnnnnnnnnnnnnnnnnnnnnnnnnnnnnnnnnnnnnnnnnnnnnnnnnnnnnnnnnnnnnnnnnnnnnnnnnnnnnnnnnnnnnnnnnnnnnnnnnnnnnnnnnnnnnnnnnnnnnnnnnnnnnnnnnnnnnnnnnnnnnnnnnnnnnnnnnnnnnnnnnnnnnnnnnnnnnnnnnnnnnnnnnnnnnnnnnnnnnnnnnnnnnnnnnnnnnnnnnnnnnnnnnnnnnnnnnnnnnnnnnnnnnnnnnnnnnnnnnnnnnnnnnnnnnnnnnnnnnnnnnnnnnnnnnnnnnnnnnnnnnnnnnnnnnnnnnnnnnnnnnnnnnnnnnnnnnnnnnnnnnnnnnnnnnnnnnnnnnnnnnnnnnnnnnnnnnnnnnnnnnnnnnnnnnnnnnnnnnnnnnnnnnnnnnnnnnnnnnnnnnnnnnnnnnnnnnnnnnnnnnnnnnnnnnnnnnnnnnnnnnnnnnnnnnnnnnnnnnnnnnnnnnnnnnnnnnnnnnnnnnnnnnnnnnnnnnnnnnnnnnnnnnnnnnnnnnnnnnnnnnnnnnnnnnnnnnnnnnnnnnnnnnnnnnnnnnnnnnnnnnnnnnnnnnnnnnnnnnnnnnnnnnnnnnnnnnnnnnnnnnnnnnnnnnnnnnnnnnnnnnnnnnnnnnnnnnnnnnnnnnnnnnnnnnnnnnnnnnnnnnnnnnnnnnnnnnnnnnnnnnnnnnnnnnnnnnnnnnnnnnnnnnnnnnnnnnnnnnnnnnnnnnnnnnnnnnnnnnnnnnnnnnnnnnnnnnnnnnnnnnnnnnnnnnnnnnnnnnnnnnnnnnnnnnnnnnnnnnnnnnnnnnnnnnnnnnnnnnnnnnnnnnnnnnnnnnnnnnnnnnnnnnnnnnnnnnnnnnnnnnnnnnnnnnnnnnnnnnnnnnnnnnnnnnnnnnnnnnnnnnnnnnnnnnnnnnnnnnnnnnnnnnnnnnnnnnnnnnnnnnnnnnnnnnnnnnnnnnnnnnnnnnnnnnnnnnnnnnnnnnnnnnnnnnnnnnnnnnnnnnnnnnnnnnnnnnnnnnnnnnnnnnnnnnnnnnnnnnnnnnnnnnnnnnnnnnnnnnnnnnnnnnnnnnnnnnnnnnnnnnnnnnnnnnnnnnnnnnnnnnnnnnnnnnnnnnnnnnnnnnnnnnnnnnnnnnnnnnnnnnnnnnnnnnnnnnnnnnnnnnnnnnnnnnnnnnnnnnnnnnnnnnnnnnnnnnnnnnnnnnnnnnnnnnnnnnnnnnnnnnnnnnnnnnnnnnnnnnnnnnnnnnnnnnnnnnnnnnnnnnnnnnnnnnnnnnnnnnnnnnnnnnnnnnnnnnnnnnnnnnnnnnnnnnnnnnnnnnnnnnnnnnnnnnnnnnnnnnnnnnnnnnnnnnnnnnnnnnnnnnnnnnnnnnnnnnnnnnnnnnnnnnnnnnnnnnnnnnnnnnnnnnnnnnnnnnnnnnnnnnnnnnnnnnnnnnnnnnnnnnnnnnnnnnnnnnnnnnnnnnnnnnnnnnnnnnnnnnnnnnnnnnnnnnnnnnnnnnnnnnnnnnnnnnnnnnnnnnnnnnnnnnnnnnnnnnnnnnnnnnnnnnnnnnnnnnnnnnnnnnnnnnnnnnnnnnnnnnnnnnnnnnnnnnnnnnnnnnnnnnnnnnnnnnnnnnnnnnnnnnnnnnnnnnnnnnnnnnnnnnnnnnnnnnnnnnnnnnnnnnnnnnnnnnnnnnnnnnnnnnnnnnnnnnnnnnnnnnnnnnnnnnnnnnnnnnnnnnnnnnnnnnnnnnnnnnnnnnnnnnnnnnnnnnnnnnnnnnnnnnnnnnnnnnnnnnnnnnnnnnnnnnnnnnnnnnnnnnnnnnnnnnnnnnnnnnnnnnnnnnnnnnnnnnnnnnnnnnnnnnnnnnnnnnnnnnnnnnnnnnnnnnnnnnnnnnnnnnnnnnnnnnnnnnnnnnnnnnnnnnnnnnnnnnnnnnnnnnnnnnnnnnnnnnnnnnnnnnnnnnnnnnnnnnnnnnnnnnnnnnnnnnnnnnnnnnnnnnnnnnnnnnnnnnnnnnnnnnnnnnnnnnnnnnnnnnnnnnnnnnnnnnnnnnnnnnnnnnnnnnnnnnnnnnnnnnnnnnnnnnnnnnnnnnnnnnnnnnnnnnnnnnnnnnnnnnnnnnnnnnnnnnnnnnnnnnnnnnnnnnnnnnnnnnnnnnnnnnnnnnnnnnnnnnnnnnnnnnnnnnnnnnnnnnnnnnnnnnnnnnnnnnnnnnnnnnnnnnnnnnnnnnnnnnnnnnnnnnnnnnnnnnnnnnnnnnnnnnnnnnnnnnnnnnnnnnnnnnnnnnnnnnnnnnnnnnnnnnnnnnnnnnnnnnnnnnnnnnnnnnnnnnnnnnnnnnnnnnnnnnnnnnnnnnnnnnnnnnnnnnnnnnnnnnnnnnnnnnnnnnnnnnnnnnnnnnnnnnnnnnnnnnnnnnnnnnnnnnnnnnnnnnnnnnnnnnnnnnnnnnnnnnnnnnnnnnnnnnnnnnnnnnnnnnnnnnnnnnnnnnnnnnnnnnnnnnnnnnnnnnnnnnnnnnnnnnnnnnnnnnnnnnnnnnnnnnnnnnnnnnnnnnnnnnnnnnnnnnnnnnnnnnnnnnnnnnnnnnnnnnnnnnnnnnnnnnnnnnnnnnnnnnnnnnnnnnnnnnnnnnnnnnnnnnnnnnnnnnnnnnnnnnnnnnnnnnnnnnnnnnnnnnnnnnnnnnnnnnnnnnnnnnnnnnnnnnnnnnnnnnnnnnnnnnnnnnnnnnnnnnnnnnnnnnnnnnnnnnnnnnnnnnnnnnnnnnnnnnnnnnnnnnnnnnnnnnnnnnnnnnnnnnnnnnnnnnnnnnnnnnnnnnnnnnnnnnnnnnnnnnnnnnnnnnnnnnnnnnnnnnnnnnnnnnnnnnnnnnnnnnnnnnnnnnnnnnnnnnnnnnnnnnnnnnnnnnnnnnnnnnnnnnnnnnnnnnnnnnnnnnnnnnnnnnnnnnnnnnnnnnnnnnnnnnnnnnnnnnnnnnnnnnnnnnnnnnnnnnnnnnnnnnnnnnnnnnnnnnnnnnnnnnnnnnnnnnnnnnnnnnnnnnnnnnnnnnnnnnnnnnnnnnnnnnnnnnnnnnnnnnnnnnnnnnnnnnnnnnnnnnnnnnnnnnnnnnnnnnnnnnnnnnnnnnnnnnnnnnnnnnnnnnnnnnnnnnnnnnnnnnnnnnnnnnnnnnnnnnnnnnnnnnnnnnnnnnnnnnnnnnnnnnnnnnnnnnnnnnnnnnnnnnnnnnnnnnnnnnnnnnnnnnnnnnnnnnnnnnnnnnnnnnnnnnnnnnnnnnnnnnnnnnnnnnnnnnnnnnnnnnnnnnnnnnnnnnnnnnnnnnnnnnnnnnnnnnnnnnnnnnnnnnnnnnnnnnnnnnnnnnnnnnnnnnnnnnnnnnnnnnnnnnnnnnnnnnnnnnnnnnnnnnnnnnnnnnnnnnnnnnnnnnnnnnnnnnnnnnnnnnnnnnnnnnnnnnnnnnnnnnnnnnnnnnnnnnnnnnnnnnnnnnnnnnnnnnnnnnnnnnnnnnnnnnnnnnnnnnnnnnnnnnnnnnnnnnnnnnnnnnnnnnnnnnnnnnnnnnnnnnnnnnnnnnnnnnnnnnnnnnnnnnnnnnnnnnnnnnnnnnnnnnnnnnnnnnnnnnnnnnnnnnnnnnnnnnnnnnnnnnnnnnnnnnnnnnnnnnnnnnnnnnnnnnnnnnnnnnnnnnnnnnnnnnnnngatcctttacacagaacagatttgaaacactctttttgtggaatttccaagtggagatttcagccgatttgaagtcaatcgtagaaaaggagatatcttcgtataaaaacaagacagaatgattttcagaaactgctttgtgatgtgtgcgttcaactcacagagtttcaactttcttttcatagagcagttaggaaacactctgtttgtaaagtctacaagtggatattcagacctctttgaggccttcgttggaaacgggatttctttatattatgctagacagaagaattctcagtaacttccttgtgttgtgtgtattcaactcacagagttgaacggttctttacacagagcagatttgagacactctttttgtggaatttgtaagtggagatttcagccgctttgaggtcagtggtagaaaaggaaatatcttcgtataaaaactagacagaatgattctcagaaactgctttgtgatgtgtgcgttcaactcacagagtttaaccttccttttcatagagcagttaggaaacactctgtttgtaaaatctgcaattggatattcagacctctttgaggccttcgttgcaaacgggatttctttatgttatgctacacagaagaattctcagtaactttcttgtgttgtgtgtattcaactcacagagttgaacgatcctttaaacagggcagattttaaacacactttttgtggaatttgcaagtggagattacagacgctttgtggtcaatggtagaaaaggaaataccttcgtataaaaacaagacagaaactcctttgtgatgtgtgcgttcaattcacagagtttaacctttcttttcatagagcagttaggaaacactctgtttgtaatgtctgcaagtggatattcggacctctttgaggccttcgttggaaacgggatttcttcatattatgctagaaagaagaattctcagtaacttctttgtgttgtgtgtatgcaactcacagagttcaaccttcctttagacagagcacatcggaaacactctttctgagggatttgcaagtggagatttcaagcgctttgattccaaaggcacaaaaggaaatattttcgcaaaaaactagacagaatcattctcagaaccggttctgtgatgtgtgcgttcaactcactgagcttaacttgtcttttcattcagcagtttggaaacactctgtttgtcaagtctgcaagtggatattcggacctctttgaggccttcgttggaaacgggatttcttcatattacactagacagaagaattctcagtaacttccttttgttgtgtgtattcaactgacagagttgaaccttcccttagacagagcagatttgaaacactctttttgtggggtttgcaagtggagatttaaagcgctttgaggccaaaggcagaaaaggaaatatcttcgtataaaaactagacagaatcattctcagaaactgctgtgtgatgtgtgctttcaactcagagagtttaacttttcttttcattcagcagtttggaaacactctgtttgtaaagtctgcaagtggatatattgacctcttagggtccttcgttggaaacgggttttttttcatgtaaggctagacagaagaattcccaataacttccttgtgttgtgtgcattcaactcacagagttgaacgttcttttagacagagcagatcggaaacaatctttttgtgcaatttgcaggtggagatttcaagcgctttaaggtcaatggcagaaaaagatatatatcttcatttcaaaactagacagaatcattccaaaaagtgcattgtgatgtgtgcgttcaactcacagagtttaacctttgttttcatataaccgattgtaaacgctctgattgtcaagtctgcaagtggatattccgacctttttgtggccttagttggaaacgggatttcttcataaaatactacacagaagaattatcagtaacttgcttgtcttgtgtgcattcaactcacagatttgaaagatcctttacacagagcagatttgaaacactctttttgtggaatttgtaagtggagatttcagccgctttgaggtcaatggcagaaaaggaaatatcttcgtataaaaactagacagaatgattctcagaaactgcgctgtgatgtgtgcgttcaactcacagagtttaacctttcttttcatagagccgtttggaaacactctgtttgtcaaggctgcaagtggatattctcacctctttgtggccttcgttgaaacgggatttcttcatataatgctagacagaagaattctcagtaacttccttctgttgtgtgtattcaactcacagatttgaaagatcctttacacagagcagatttgaaacactctttttgtggaatttgcaagtgcagatttcaagcgcttggaggccaattgtagaaaaggaaatatcttcgtataaaaacaagacaaaatcattcccagaaactgcgtagtgaggtgtgtgtttaactcacagagtttaacctttcgtttcatacagcattttggaaacactctgtttgtaaagtctgcaagtggatatttggatctcttagatgccttcgttggaaacgggatttcttcatataatgctacagggaagaattcttagtaacttctttgtgttgtgtgtattcaactgtcagatttgaaccttcatttagacagagcagatttgaaacactctttttgtggaatttgcaaatgcagatttcaagccctttgaggccaaacgcagaaaagcaaatatcttcgtataaaaactagactgaatcattctcagaaactgctctgtgctgtgtgcgttcaactcacagagtttaagttttcttttcattcagcagtttggaaacgctctgtttgtaacgtctgcaagtggatattttgacctctttgaggccttcgttggaaacgggatttcttcatataatgctagagggaagaattcttagtaacttcttcgtgttgtgtgtattcaactgtcagagttgaaccatcatttagacagagcagatttcaaacactctttttgtggaatttgcaaatgcagatttcaagtcctttgaggccaaacgcagaaaaggaaatatcttcgtataaaaactaggcagaatcattctcagagactgctctgtgctgtgtgcgttcaactcacagtgtttaagttttcttttcattcagcagtttggaaatgctctgtttgtaacgtctgcaagtggatattttgacctctttgaggccttcattggaaacggatttttttcaggtaaggctatacagaagaattcttattaacttccttgtgttgtgtgtattcaactctcagaattgaattttcttctagacacagcagatttaaaacactctttttgtgcaatttgcaagtggagatttcaagcgctttgattccaatagtagaaaagggaatatcttcgcataaaaactagacaaaatcattcccagaaactgcatagtgatgtgtgtgtttaactcacagagtttaacctttcttttcatacagcattttggaaacactctgtttgtaaattctgcaagtggatatttggacctctttgaggccttcgttcgaaacgggatttcttcatatactgctaaacaaaacaattctaagtcacttctttgtgttgtgtgtattcaactgacagagttaaaccttcctttagacagagcagatttgaaaccctccttctgtggaatttgcaagtggcgatttcaagcgctttaaggtcaatggcagaaaaggaaacatcttcgtttaaaaactagacaaaatcattcccagaaactgcgttgtgatgtgtgcgttcaactcaaaaagtttaacctttcttttcatagagccgtttggaaacactctgtttttgaagtctgcatgtggatattcggacctctttgaggccttcgttagaaacgggatttctttatattatgctagacaaaagaattctcactaacttctttgtgttgtgtgtgtgcaactcacagagttcaaccttcttttagacagagcagatttgaaatactctttttttggaattggcaactggaagtttcaagcgcttagaggccaatggtagaaaaggaaatatcttcgtataaaaacaagacaaaatcattctcagaaactccgtagtgatgtgggtgttttactcacagagtttaacctttcttttcatacagctttttggaaacactctgtttgtaaagtctggaagtggatatttggaccacttgtatgcctcctttggaaacgggatttcttcatataatgctggagagaagaattcttagtaacttcttcgtgttgtgtgtattcaactgacagatttgaaccttcctttagacagaggagatttaaaacactctttttgtggaatttgcaagtagagatttcaagcgctttgaggccaatggcagaaaaggaaatatcttcgtataaaaactagacagaatcattttcagaaactgctctgtgatgtgtgtgttcaactcagagagtttaacttttcttttcattccgcagtttggaaacactctgtttgtaaagtctgcaagtggatattttgacctctttgaggccttcgttggaaacgggtttttttcttgtaaggctagacagaagaattctcagtaacttccttgtgttgtgtgtattcaactcacggagttgaacgttcctttagagagagcagacttgaaactctctttttgtggaatttgcaagtggagatttcaagagctttgttgccaatggtagaaaaggaaatatcttcgcataaaaactagacaaaatcattcccagaaactgcgtagtgatgtgtgtgtttatctcccagagtttaacctttcttttcataccgcattctggaaacactctgtttgtaaagtctgcaagtggatatttggacctcttagatgccttcgttggaaatgggatttcttcatataatgctagacagaagatttctcagtaagttcttcatgttgtgtgtattcaactctcagatttgaacgttcctttagacacagcagatttgaaacactctatttgtggaatttgcaagtggagatttcaagcgctttgaggccaacggtaaaaaaggtaataaattcgtttaaaaactacacagaatcattcgcagaaactgcgttgtgctgtgtgcgttcaattcacagagtttaacctttcttttcattcaacagtttggaaacactctgtttgaaaagtcttcaagtggatatttggacctccttgaggcgttcgttggaaacgggatttcttcatatagggttagacagaagaattctctgtaatttccttttgttgtgtgtattcaactcacagaggtgaacgttcctttagacagacagatttgaaacactctttttgtggaatttgcaagtggagatttcagccgctgtgaggtcaatggtagaaaacgaaatgtcttcatataaaaactatacagaatgattctcagaaacttctttgtcatgtgtgagttgaactcacagagtttaacctttcttttcattcagcagtttggaaacactctgtttataaagtctgtaagtggatattttgacctctttgaggccttcgttttaaacgggtttttttcatgtaaggctagacagaagaattctcagtaacttccttgtgttgtgtgtattcaactcacagatttgaacgttcctttagacagaggagatttgaaacactctcattgcggaatttgcaagtgggatttcaagcgctttgaggccaacggtagaaaaggaaatatcttcgtttcaaaactagacagaatcattcccacaaactgcgttgtgatgtgtgcgttcacctcacggaccttaacctttcttttcatagagcagtttggaaacactctgtttgtaaactctgcaagtggatatttggacctattagacgccttcgttggtaacgtgatttcttcatataatgctaaacagaagaattgtcagtaacctccttttgttttgtggattcaacccacagagatgaacattcctttagacagagcagatttcaaacacactttttgtggaatttgcaagtggagatttcaagcgctttgaggccaattgtagaaaaggaaatatcttcgtataaaagctagacagaatgattcccagaaactgcgttgtgatgtgtgcgttcaagtcacagagtttaacttttcttttcattgagcagtttggaaacactctgtttgtaaagtctgcaagtggatatttggatctagtagaggccttcgttggaaacgtattttgttcatgtaacgctagacagaagaattctcagtaacttccttgtgttgtgtgtattcaactcgcagagttgaacggtcctttagacagagcagatttcagacactcattttgtggaatttgcaagtggagatttcaagcgctttaagctcaatggcagtaaaaggaatatcttcgttgaaaaaatagacagaatcattcccacatagtgcgttgttatgtgagcgttcaactcacagagtttaactattcttttcatagagcagttaggaaacactctgtttgtaaagtctgcaagtggatattttgacctctttgaggccttcgttggaaacgggtttttttcatgtaaggctagacagaagaattcttagtaacttccttgtgttgtgtgtgttcaactcacagagttgaacgtttctttagacagagcagatttgaaacactgtttttgtggaatttgcaagtggagatttcaagcgatttaaggtcaatggcagaaaaggaaatatcttcgtttcaaaactagacagaatcattcccggaaactgcgtagtgatgtgtgtgtttaactcacagagtttaacctttcttttcattctgcagtttggtaacactctgtttgaaaaatctgcaagtggatattttgacctccttgaggcgttcgttggaaacgggatttcttcatataaggcacgacagaagaattctcagtaacttccttgtgttgtgtgtattcaactcacagagttgaacgttcctttagacagagcagatttgaaacacgctttttgtggaatttgcaagtggagatttcaagcgatttaaggtcaatggcagaaaagggaatatcttcgtttaaaaactagacaggatcattcccacaaactgcgttatgatgtgtgcgttgaactcactttgtttaacctttcttttcatagagccatttggaaacactctgtttgtcaagtctgcatgtggatattcggtcctctttttggccctcgctggaaacgggatttcctcatataatgctagacagaagaattctcaataacttccttgtgttgtgtgtattcatatcacagttttgaacgttcctttagacagagcagatttgaaacactctttttgtggaatttgcaagtggagaattcagccgctttgaagacaatgttagaaaaggaaatatcttcgtagaaaaactagacagaatgattatcagaatctgcttggtgatgtgtgcgttcaactcacagactttaatctttcttttcatagagcagttaggcaacactctgtttgtaaagtctgcaagtggatattcggacctctttgaggccttcgttggaaacgggatttcttcatatagtggtagacgaaagaattcttagtaccttctttgtgttgtgtttatgcaactcaccgagttgaaccttcctttatacagagcagatttgaaacactctttttgtggaatttgtaagtggagatttcaagcgatttgaggccaatggtagaaaaggaaatatcttcatataaaactagaaagaatcattccccaaaactgcatggtggtgtgtgcgtcaactcacagttttacgtttgttttcatagagcagttgggaaacactctgtttgtaaagtcttcaagtggatatttttacctccttgagaccttcgttggaaacgggatttctttatataatgctagacagaggaattctcagtgacttccttttggtgtgtgcattcaactcacagagttgaaccttcctttagacagagcagatttgagacactctttttgtggaatctgcaagtggaaatttcaagagcttggaggccagtgttagaaaaggaaatatcttcgtataaaaactagacagaatcattcccagaaactgcgttgtgatgtgtgcatttaactcacagagtttaacctttcttttcattcagcagtttggaaacactctgtttgaaaattctgcaagtggatatttggacctccttgaggcgttcgttggaaacgggatttcttcatataaggctagacagaagaattctcagtaacttccttgtgttgtgtgtattcaactcacagagttgaaccctcctttagacagagcagatttgatacactctttttgtggaatttggaagtggagctttcagccgctttgaggccaactgtagaaaaggaaatatgttcgtataaaagctagacagaatcactcccagaaacttcgttgtgatgtgtgtgttcacctcacatagtttaacctttcttttcattgagcagtttggaaacactttgtttgtaaagtctgcaagtggatatttggacctagtagagcccttctttggaaacaagatttcttcatataatgctagagagaagaattctcagtaacttcattttgttgtgtgtattcaactcacagtggtgaactttcctttagacagagcagagttgaatcttccttttgatagagctgtttttactctttttattgaatatgcaagtggatatttggagtgctttggagccttcgttttaaaaggtaatatattcacataaaaactagacagaagcattctcagaagcttctttttgatatgtgcactcaactcacagagttgaacctgccttttgatagagcagttttgaaacgctcttttgttgtatctggaagtggatatttggagtgctttgaagccttcattggaaacgggaatatattctcattaaaactagacagaagcattctcagaaacttccttgtgatgtgtgcgttcaactcacagagttgaacctttgctttggtgtagaagttttgaaacactctttttgtagaatctgcagttggatatttgtagctctttgaagcctatggtagaaaaggaaatatctacacataaaaactagacagaagcattctcagaaacttctttgtgatgtgtgcttacaaatcccagaatttaaactttttttttgacagagcagttttgaaacactcttcttgtagtatttgcaagtggataattggattaccttgaagccttggtggaaatggaaatattttccaataaaatctagacagaagcattgtcaaaaactcctttgtgacgtgtacattcaactcacagaattttacatatctcttaacagagcagttttgaaacccactttttgtagaatctgcaagtggatatttggagcaatttgtgggtatggtggaaaaggaaataccttcacataataactagacagaagctttcagaaacttctttgtgatatgtgcattcaattcacagagttgaacctttcctttgatagagcagttttgaaacactctttttgatgaatctgtaattggatatttggagtgcattgtggcctatggtagaaaaggaaatatcttcacataaaaactagacagaaaaattctcaaaaacctctttctgatgtttgcattcaactcacagagttaaaaatttcttttgatagagcagttttgaaacactctttttgcagaatctgcaagtggatatttggacagctttgaggcctttgttttatttttatttttatttttttaaatgaaaaatatttatttattataaacctattttgtttgtttgttttttattatactttaagttttagggtacatgtgcacattgtgcaggttagttacatatgtatacatgtgccatgctggtgcactgcacccactaactagttatctagcattaggtatgtctcccaatgctatccctctcccctcccccaaccccaccacagtccccagagtgtgatattccccttcctatgtccatgtgatctcattgttcaattcccacctatgagtgagaatatgcagtgtttgatttttttgttcttgctatagtttactgagaatgatgatttccaatttcatccatgtccctacaaaggacatgaactcatcattttttatggctgcatagtattccatggtgtatatgtgccacattttcttcatccagtctataattgttggacatttgggttggttccaagtctttgctattgtgaataatgccgcaataaacatacgtgtgcatgtgtctttatagcagcatgatttatagtcatttgggtatatacccagtaatgggatggctgggtcaaatggtatttctagttctagatccctgaggaatcgccacactgacttccacaatggttgaactagtttacagtcccaccaacagtgtaaaagtgttcctatttctccacatcctctccagcacctgttgtttcctgactttttaatgattgccattctaactggtgtgagatggtatcttattgtggttttgatttgcatttctctgttggccagtgatgatgagcattttttcatgtgttttttggatgcataaatgtcttcttttgagaagtgtcttttcatgtccttcacccactttttgatggggttgtttgtttttttcttgtacatttgtctgagttcattgtagattctgtatattagccctttgtcagatgagtaggttgcgaaaattttctcccattttgcagttttgaaacaatctttttgtacaatctgaaagtggataattcgagtacttagaagccttctttggaaacgggaatatcttcacataaaaattagacagatgcattttcagaaactactttgtgatggtagcattcaactcagagagttgaaacctccttttgatagatctgttttgaaaggctctttttgtagaatctgcaagtggatatttggagcgctttgaggcctgtggtagaaaaggaaatatcttcataaaaaaaatagacagacgtattctcagaaactacttcatgatgtgtgcattcaacacagagactttaacctttcttttgatagaggaactttgaaacactctttttatagaatctgcaaagggacatttggagcactttgacggataccgtggaaaaggaaatatcttcacataaaaacgagtcagaagtgttctcagaaacttctttgtgttgtttgcattcaactcacagagttgaaactttcttttcattgagcagttttgaaacactctttttgtagaatccgcaagtggatatttggactgctttgaggccttcattgtaaatgggaatatcttcacataaaaactagacagaagcattctcagaaacttctttgtgatgtgggcattcacctcaaagtgttgaaccttcttttgatacagcagttttgaaaaactctttttgtggtatctgcaagtggatatttggagcgtgttgaggccttcgtttgaaacgagaatatcttcacataaaaaccagacagaagcattatcagaaacttctttgtgatgtgtccattcaactctcagagttgaaccttccttttgatagagcagttttgaaatactttttttgaaggacatgcaagtgtatatttggagtgttttgaagccttcattggaaacaggaatatcttcacataaaaactagatggaagcattctccaaaacttctttgtgatgtgtgcattggtagagcagatttgaaacactctttttggagaatctgcaagaggatatttggagccctttaaagcctatggtagaaaaggaaatttctttatacaaaaactggaaagaagaattctcagaaattagtttttgatgtgtacattcaactcacaaattttaagctttcttttgatacagcagttttgaaacactctttttatagaatctgcaagtggatatttggactactttgagaccttcgtcggaaacgggaatatctttacataaaaactagacagaggcattctcagaaaatactttgtgaagtgtgtattcaactcacagagttgaactttccttatgatagtgcagttttgaaacacactttttgtagaatctgcagttggatatttggactgctttgaagccttctttggaaatgggaatatcttcacataaaaactaggcagaagcattctcagaaacttcattgagatgtgtgcattcaactcacagagttcaaccccactttggatagagcagttttgaaacactctttttgtagaatctgcaagtggatatttggaatcttcagaagcctatggtggaaaaggaaatgtcttcatataaaaactagaaagaaacattctcagaaactacttagtgatgtgtgcttacaactcacagaatttaacctttcttttgaaagagcagttttgaaacactcttcttgcagaatgtgctagtggataattggagtgctttgaaggctttgttggaaacgggaatatcgtcacaagaaaaatagacagaagcattctcaaaaactgcattgtgatgtgggcattcatctcacagagttaaacttatctttttacagaacagttttgaaacactctttttgtagtatctgccattggatatttgggacgctttgaagcctttcttggaaacgggaatatattcacaaaaaactagacagaagcattctcagaaacttccttgtgatgtgtgtattcaactcacagagttgaacgttctttttgaaagatcagttttgaaacactccttttgtagtatctgcaagtggattattggagtactttgaagtcttcattggaaacgggtatatcttcacataaaaactagaagatgcattctcacaaacttcattgtgatgtgtccattcaagtcacagagctgcaccttccttttcatagagcagttttgaaagagtctttttgtagtatctgcaagtggatacttgtagtggtttcaagccttcaatggaaacgggaatatctccaaataaaaaaaagacagaagcattctcaggaacttccttgtgatgtgtgcattcaactcacagagttgaacctgccttttattagagcagttttgaaacactctttttgtagaatctgcaagttgatcattggggtactttgaagtcttcgttggacacgtgtatatcctcacatgaaaactagacagaagtattctcagaaacttcttttagatatgtgcatttacctcatagagttgaaccttccttttgatagagcagttttgaaacgctctttttgtagtatctgcaagtggatatttggagtgctttaagccttcatcggaaacgggaatatattcacataaaaactagagagaagcattctcaaaaacttccttgtgatgtgtgcattcaactcacagagttgaatcttccttttgatagagccgttttgaaacactctttttgtaaaatctgcatgtggataattggagtgctttgaagtcttcgatgaaaacgggtatatcttcacataaaaactagaaagatgcattctcagaaacttctttgtgatgtgtccattcaactcacagagctgaaccttcctttagatagagcaattttgaaagagtctttttgtagtatctgcaagtgggtatttttagtggtttgaagcctttgttggaaaagtgaatagctcaaaataaaaactagacagaagcattctcagtaacttccttctgatgtgtgcattcaactcacagagttgaaccttccttttgatagagcagttctgaaacactctttttgtagcatctgcacgtggataattggagtaatttgcagtcttcgttggaaacgggaatatattcacataaaaactagacagatgccttctcagaaacttctttgtgatgtgtccattcaactcacagagctgaaccttccttttgatagagcagttttgaaagagtatttttgtagtgtctgcaagtggatatttggagtgctttaagccttcattggaaacgggaatatattcacataaaaactagacagaagcattctcagaaacttccttgtgatgtgttcattcaatgcacagagttgaatcttccttttgatagagcagttttgaaacactctttttgtagaatctgcaagtgcatcattggtgtactttgaagtcttcgatgaaaacgggtatatcttcacataaaaactagacagatgcattctcagaaacttctttgtgatgtgtccattcaactcacagagctgatccttccttttgatagagcagttttaacttacaagggatgtgaaggacctcttcaaggagaactacaaaccactgctcaaggaaataaaagatgatacaaacaaatggaagaacattccatgctcatggttaggaagaatcaatatcgtgaaaatggccatactgtccaaggtaatttacagattcaatgccatccccatcaagctaccaatgactttcttcacagaattggaaaaaactactttaaagtgcatatggaaccaaaaaagaacccacatcgccaagtcaatcctaagacaaaagaacaaaggtggaggcatcacactacctgacttcaaactatactacaaggctacagtaaccaaaacagcatggtactggtaccaaaacagagatatagatcaatggaacagaacagagccctcagaaataatgccacatatctacaactatctgatctttgacaaacctgagaaaaacaagcaatggggaaaggattccatatttaataaatggtgctgggaaaactggctagccatatgtagaaagctgaaactggatccgttccttacaccttatacaaaaatcaattcaagatggattaaagagttaaatgttagacctaaaaccataaaaaccctagaagaaaacctaggcaataccattcaggacatagacatgggcagggacttcatgtcgaaaacaccaaaagcaatggcaacaaaagataaaattgacaaacgggatctaattaaacaaaagagcttctgtacagcaaaagaaactaccatcagagtgaacaggcaacctacaaaatgggagaaaacttttgcaacctactcatctgacaaagggctaatatccagaatctacaatgaactcagacaaatttacaagaaaaaaaacaaacaaccccatcaaaaaatgggccaaggacttgaacagacacttctcaaaagaagacatttatgcagccaaaaaacacatgaaaaaatgctcatcatcactggccgtcagagaaatgcaaatcaaaaccacaatgagatactacctcacaccagttagaatggcaatcattaaaatgtcaggaaacaacaggtgctggagaggatgtggagaaatagcaacacttttacactgttggtgggactgtaaactagttcaacctttgtggaagtcagtgtggcgattcctcagggatctagaactagaaataccatttgacccagccatcccattcctgggtatatacccaaaggactataaatcatgctgctataaagacacatgcacacatatgtttattgcggcactattcacaatagcaaagacttggaaccaacccaaatgtccaacaatgatagactggattaagaaaatgtggcacttatacaccatggaatactatgcagccataaaaaatgatgagttcatgtcctttatagggacatggatgaaactggaaatcatcattctcagtaaactatcacaagaacacaaaaccaaacaccgcataatctcactcataggtgggaattgaacaatgagatcacatgggcacaggaaagggaacatcacactctggggactgttgtggggtgcggggagcggggagggatagcattgggagatatacctaatgctagatgactagttagtgggtgcagtgcaccagcatggcacatgtatacatatgtaactatcctgcacaatgagcacgtgtaccctaaaacttaaagtataataatacaagaaaaattaaaaaaaaatccggtaaactaaatgttcacagtgacaattataatagtctaaaagtggaaagaaaccaaatgttcatctattgataaatggttaaacaaaatgtggtatatacatatggaatgtcattttccacaaaaaggaagtgctattgcatgctataacatggatgaacgttgtaaacattatgctaaataaaagaaaccaaatacaaaaggccacatattgtatgattcaagttatatgaaatgtccagaataggcaaaatcatagaaacagatagcaaatttgaggtgccaagggttagaggattggggaattggaggtgactgctgtcagttatgagatttctttttgtggtgatggaaatgttccagaattaggtcatgatgattaacataacactgtgactatactaaaaaaacattaacctgtaaacttgaaaatggtgacttgtatgttatgtgaataatacctaaataattaaaagaagtaaggataataaaatcatcttaatcagccagctatgctagagcaagtaaagctaaatatctttttaggatctagagaaaataaaattataaaattatcatacataaagacaattaatgagtatgcagcaaaaaactattacaaagatgggtcatgcaattctataatttgtaaatgttatttttatcaactgagtggtatatttcaaaaatttaaagcatttttaagtttataattcattgtgtttgttttttcactccaaataaatacctactgtcatgactaaaaaaaaaaaagaaagagtctttttgtagtatctgtaagtggatatttgtagtggtttgaagccttcgttggaaaagggaatatctccaaatgaaaactagacagaagcattctcagaaacttccttgtgatgtgtgcattcaactcacagagttgaaccttccttttgatagagcagttctgaaacactctttttgtagcatctgcacgtggacaattggagtaatttgtagtcttcgttggaaacgggaatatcttcacataaaaactagacagatgccttctcagaaacttctttgtggtgtgtccattcaactcacagagctgaaccttccttttgatagagcagttttgaaagagtctttttgtagtgtctgcaagtggatatttgtattggtttgaagccttggttggaaaagggaatatctccaaataaaaactagacagaagcattctcagaaacttccttgtgatgtgtgcattcaactcacagaattgaaccttccatttgatagagcagttctgaaactctctttttgtagcatctgcacgtggataactggagtactttgatgtcttcattggaaatgggtatatcttcacataaaaaatagaagcattctcaaaaactactttgtgatgtgtgcattcaactcacagatttgaaccttccttttgatagaacagttttgaaacactctttttgtagattctgcaattggatattgggagtgctctgaagtcttcgttggaaacgggaatttctccacataaaaactagacaaaagcattctcagaatcttctttgagttgtttgcattcaactcacagagttgaaactttcttttgatggagcagttttgaaacactctttttgtagaatatgcaagtggatattttgtctgctctgaggaattcgttggaaacgggaatatcttcaaacaaaaactagacagaagcattctcagaaactgctttgtgatgtgtgtgttgaactcacagcgtttaaacttccttttcatagagaagttttgaaacactcttttgtagaatatgaaagtggatatttggagtgctttgaagccttcattggaaaggggaatatcttcacataaaaactagacagaaggattctcagaaacttccttgtgctgtgtgcattccacttacagatttgatccctccttttgaaagaacagttttgaaacattctttttgtagaatctgcagttggatatttggaaccctttgaggcctacggtagaaagggcaatatcttcatataaaaactagaaaaaaaacattctcagaaactactttgtgatgtgtgcattcaagtcacagagtttaacctttcttttgatagagcagttttgaaaaactctttttgtagaatctgtaagtggacatttggagcactttgagggttactgtggaaaaggaaataccttcacataaaaactagacagaagcattctcagaaacttctttgtgatgtttgcattcaactcacagtgttgaacctttcttttcatagagctgttgtgaaacacactttttgtataatctgcaagtggatatttggactgctttgagtccttcattgggaacggaaatatcttcacataaaaactagactgaagaattctgaggaaattctttgtgatgtgtacattcacctcacatagttgaaactttcttttgataaaacagttttgaaactgtttttgcagaatctgcaattggatatttggagtgctttgaggcctatgttagaaaaggaaataccttcatataaaaactagacagaagcattctcagaaactactttgtgatgtgtgcttacaactcgcagaatttaacctttcttttgatatgcagttttgaaacactctttttgaagaatctgcaaggggataatttgagtgctttgaagccttccttgcaaacgggattatcttcacataaaaattagacagaagtattctcaaaaactacattgtgatgtgggcattcatctcacagagtttaaccattcttttgatagggaagttttgaaacactgtttttgtagaatttgcaagttgatagttggaccactgtgaggccttcattggaaaggggaatatcttcacataaaaactacacagaagcattctcagaaacttctttgtggtatgtgcattcaacacacagagctgagtcctccttttcatagagcagttttgaaacactctttttatagtatccgcaagtggatatttcagtgcttggaagccttctttggaaactggaatataataacataaaaagtagacagaagcattgccagaaacttccttgtgatgtgtgcattcaactcacagattttaactttcttttgatagagcagttttgaaacactttttttgtagaatctgcaagtggatattctgactgcttgtaggcattccctagaaacaggtatatcttcacaaaaaaactagacagaagcattctcagaaacttctttgtgatgtttgcattcacctcacagatttgaacctttcttttcatagagcagttttgaaacactcttttggtagtatctgcatgtggatatttggacttcattgaggcctttgttagaaacgggattatcttcacataaaaactagacagaagcattctcagaaacttctttttgatgtgtgcattcaactcactgagttgaaactttcttttgttagagcagttttgaaacactctttttgtagaatctgccattggatatttggagcactttgaggcctatcatagaaaaggaaatagcttcatgtaaaaacaagacagaagcattctcagaaactacttcatgatgtgtgcttacaactcacagaatttaaactttcctttgatagagcagttatgaaaaactctttttgtagaatctgcaagtgggtaattggagtgctttgaagccttcagtgggaacgggaatatcttcacataaaaaaaagacagaagcattctcagaaactactttgtcatgtgattttgaactcacagagttgaaccttccttttgatagagatgttttgaaacactctttttgaaaaatctgcaagtggataattggagtgctttgaagccttcgttggaaatgggaatatcttcacataaaaaccagacagaagcattcttagaaactctttgggatgtgtgtagtcaactcacagagtttaacttatcttttgatagagcagttttgacacatgctttttgtaaaatctacaagtggacatttggagcactttgagcactatggtggaaaaggaaatatcttaacataaaatagacagaagcattctcagaaacttctttgtgatatgtgcattcaacactcagagttgaacctttctttcaatagagtacttctgacacactctttttgttgaatctgcaagtggacatttggggcactttgagggctatgttgaagaaagaaatatcttcacataaaaactagacagaagcattctcagaaacttctttcggtcgtttgcattcaactcagagatttgaacctttcttttgatagagcagttttgaaacactcttttagtagaatcagcacatggatagtttgagtgcttagaatacttcgttggaaaagggaacagcttcacataaaaactagacagaaggattctcagaggctactttgtgatgggtgtgttcaactcagagagttgaacattcctttttgtgcagcagattttaaacactctttttgtagaatctgcaataggatattttcagcctgttgaggcctctggtaggaaaggaaattactttatataaaaactagaagaaagaaatctcagaagctagtttttgatgtgtgcattcaactcacagattttaacctttcttttgatagagcagttttgaaacactctttttgtagaatctgcaagtggatatttttacagctttgaggaattcgttagaaacgggaatatcttcacataaaaactagacaaaagcattctcacaaacttctttgtgatgtttacattcagctcacagtgttgaacttttcttttcatagagcagttttgaagcactctttttgtagtatctgcaagtggatatttggacttttttgaggccttcattggaaacgggaatatctacacataaaaactagacagaagcattctcagaaacttctttgagatgtgtgcattcaactcacagaattgcacctttcttttgatagggcagttttgaaacactctttttgtagaatttgaaattggatatttggagcgctttgaggcctaagttagagaaggaaatatcttcatataaaaactagaccgaagcattctcagaaacaactttgtgatgtgtgcttacaattcacaatataaaacgtttttttttttttttgatatagcatttttgaaacactctttttgtagaatctgcaactggataattggagttctttgaagccttctttggaaacgagaagatcttcacataaaaactagacagaagcattctcaaaaactacattgtggtgtgcgcattcaactcacggagtttaacctatcttttgacagagcagttttgaaacactcttttgtagaatctgcaagtcgacatttggagcactttgagggctatggtggaaaagtaaatatcttcacataaaaactagacagaagcattctcagaaacttctttgtgatgtttgtattgaacccagagagttgaaaatttcttttcacagagcatttttgaagtactctttttgtagaatatgcaaggggatatttgggctgattaggggccttcattggaaacgggaatatcttcacataaaaactagacagaagcattctcagaaacttctttgtgatgtgtgcattcaacacacagagtttaaccattctttttatagagcagtttgaaccactctttttgtagaatctgcagtggacatttgaagcactttgagggctatggtggaaaaagtaatatcttcacaaaaaaactagacaggagcattctcagaaacttctttgtgatgtttgcattcaactcacagagttgaacctttcttttgatagagtagttttgtaactctcgttttgtagaatctgcaagtggatatttggacttctttgagagcttcgtaggaaatgggaatatacaaacagagagaagcattctcaaaaactactttgtgatgtgtgcattcaactcaccgaatttaacctgtcatttgacagagcagatttgaaacactctttttgtagaatctgcaagtggacatttggggcactttgagggctatggtggagatggaaatatcttcacataaaaactagacagaagtattctcagaaactgctttgagatgtttgcattcaactcagagagtcgaacatttcttttgatagagcagctttgaaacattttttttttagaatctgcaagtggatatttggacagctttgaagccttggttggaaacggtaatatcttcccataaaaactagatagaagcattctcagaaacttttttgtaatacgttcattcaactcaaagagttgaaccttccttttgatagagcagttttgaaacattctttttgtagaatctgcaagtggataattggagtacattgaagtcttcattggaaacggatttatcttcacataaaaactacacagatgcattctcagaaacttctctggcacgcgtacattcaactcacagcgttgaacctttctttttatagagcagttttgaaacactctttttgtaaaatctgcaagtagttatttggagtggtttgaagccttccttggaaatgggaatatctccacataaaaaccagacagaagcattctcagaaacatctttgtgatgtgtgcattcaactcacagagttgaaccttccttttgatagagcagttttgaaacactctttttgtagaatctgcaagtggatatttagaaacatttgacgccttcattggaaaagggaatatcttcacataaaaactagacagaaggattctcagaaactactttatgtgtgcattcaactcacagatttgaaccctccttttggtagagtagatttgaaacactgtttttgtagaatctccaagtgggtatttgtagccctctgaggcctctggtagaaaaggcaatttctttatatgaaaattagaacaaagcattctcagaaactagtttgtgatgtgtgcttttaactcacagagtttaacttttcttttgatagaacagttttgaaacactctttctgtagaatctgcaagtggatattttgactgctttgaggaattcattggaaacgagaaaaacttcatataaaaactagacagaagcattctcagaaacttctttgtgatatttgcattcaactcacagagtaaaacctttcttttcatagagcagttttgaaatattctttttgtagaatctgcaattggatacttggagaggtttgaggcctatggtagaaaaggaaatatcttcatataaaaactagacagaagcattctcagaaactacttcgtaatgtgtgcttacaactcacagaatttaacctttcttttgatagaggagttttgaaacactgttttggtagaatctgcaagtggataattagagtgctttgaagctttgttggaagagggaatatcttcacataaaaactagacagaagcattctcaaaaactactttctggtgtatgcattcaactcacagagtttaacctatcttttgacagaacagttttcaaacactgtttttgtagaatccgcaagtggacattttgagcactttttgggctatggtggaaaaggaatatcttcacataaaatcagactgaagcattctcaaaaacttctctgcgatgtttgcattcaacacagagagttgaatatttcttttgatagagcaattttgaaacactttttttggagaatctgcaagtcgatatttgttctgctttgaggccttcattggaaacgggaatatcttcacataaaaactagacagaagcattctcaaaaactacattgtcctgtgtgcattcaactcgcagagattaacatatcttttgacagagcagttttgaaacactctttttgtagaaactgtaagtggacaatttgatcactttgagagctatggtggaaaaaataatatcttcacaaaaaaactagacagaagcattttcagaaacttctttgtgatgtttgctttcaactcactgagttgaaactttcttttcatagaacagttttgaaacactctttttgtggaatctgaaagtggatatttggaccgctttgaggccttcgtaggaaacgggaatatcttcacataaaaactagacagaagcattctcagaaacttctttgtgatgtgtgcattcaactcacagagttgaacttaccttatgatagagcggttttgaaaccctctttttgtagaatctgcaagtggatatttggactcctttgaggccttcataggaaacggaaaaatcttcacataaaaactagacagaagcattctcagaaacgtctttgtgatgtgtgcattcaactcccagagttgaaccttccttttgatagaatctgaaagtggatatttggagtgctttgaagccttcgttgaaaacgggaatatcttaacataaaaaccagacagaagcattctcagaaacttctttgggatgtgtgcattcaactcacagagttgaacatttcttctgatagagctgttttgaaacactctttttgtagaatttgtgagtggatatttggagtgctttgaagcctttgttggaaacgggaataactccacataaaaactagacagaagcattctcagaaacttctttgagatgtgtgacttcaactcacagagtttcacctttctcttgatagagcagttttgaaaccctttttttgtacaatctgcaagtggaaaattggagtgctttgaagctttcgttggaaaggtgtatatcttcacataaaaactagacagaaatattctcagaaacttctttgtgatgcgtgcattcaactcacagagttaaacctttttttgatagagcagttttgaaacaaactttttgtagaatctgcaagtggacatttggagcactttgagggctctggtggaaaaagaaatatcttcacataaaaactagacagatccattttcagaaacttctttgtgatgtctgcattcaactcacagagttgaacctttcttttgatagagcaatttttaaacactctttttgtaggatctgcaagtggacatttggagcactttttgggctatgttggaaaaggtaatattttcacataaaaactagagagaagcattctcagaaacttctttgtgatgttgcattcaactcagagagttgaacatttgttttgatatagcagttttgaaactctctttttgtagaacctgcaagtggacatttggaccgcgttgaggccttcgttggaaacgggaatatcttcacataaaaattaaacagaagcattctcagaagctactttgtgatgtgtgcattcaactcaccaagttgaacattccttttgttagagcagatttgaaacactctttttgtagaatatgcatgtggatatttggagtgctttgaagccttctttggaaacgggaatatcctcacttaagaactagacagaagcattctcagaaacttccttttgatgtgtgcgttcaactcacagagttgaaccttcgttttgatagagcagttttgaagcactcgttttatagaatatgcacgtgggcatttggagcactttgagggctacggtttaaaagaaaacaccttcacaagaaaacttgacagaagcattctcagaaacttcgtcaggatgtttgcattcaagtcatggagttgatactttcttttcatagaacagttttgaaacactgtttttgtagaatctgcaagtggatatttagactgctttgagaccttcttcggaaacgctaatatcttcacataactagacagaagcattctcagaaacttctttctgaagcgtgaattcaactcacagaattgaacttttcttttgataaagcagtttggaaacactatttttgtagaatctgcaattggatatttggagcgctttaaggcttatggtagaagaggagatatcttcatataaaaattacacagaagcattctcagaaactacttagtgctgcgtacctaaaactcacagaatttaacctttcttttgatagagcagttttgaaacaccctttatgtagaatctgcaagtggataattgtagtgatttgaagcattcgttggaaatgggaatatcttcacaaaaactagacagaagcattctcaaaaactactttgtgaggtgggcattcaactcccagagtttaacatatcttttgacagagcagtttgaaacactctttttgtagaatcagcaagtggacttttggagcactttgagggctgtggtgaaaaaaagaaaaaaatcttcacataaaaattagacagaagcattctcagaaacttctttgagatgtttgcattcaactcagagagtcgaacatttcttttgatagagcagttttgaaacactcagtttgtagaagctgcaagtggatatttgcaccactttgaggccttcgttagaaacgggaatatcctcacataaaaactagatagaagaattctcagaaacttctttgtgatatgtgcattcaacccactgagttgaaccttccttttgatagagcagttttgaaacactctttttgtagtatctgcagttcgatatttggagtgctttgaaccctttgttggaaacgggaatatgttcacataaaaactagacagaagcattgtcagaaacttccttgtgatgtgtgcattaaactcatagagttcaacctttcttttgatagagcagttttgaaacactgtttttgtagaatctgcaagtggataaatggagtattttgaggtcttcgttggaaacggttgtatcttcacattaaagctagacagatgcattctcagaaacttctttgtgatgtgtgcatttaactcacagagttgaagctttcttctgataaagcagttttgaaacagtctttttgtaggatctgtaagtggatatttggagtggcttgaagccttcgttggaaacgggagtatctccacataaaaactagacagaagcatactccgaaacttctttgtgatgtttgcattcaactcacatagttgaaactttcttttcatagagcagatttgatacactctttttcagattctgcaagtggatatttggactgccttgaagccttcgtttgaaacgggaatatcttcacataaaaactagacagaagcattctcagaaacttctttgtgatgtgttcattctactcacagagttgaagctttctttcaatagagcaattttgaaacacactttttttagaatctgcaattggatatttggagcgctctgagccctatggtagaaaagcaaatatcttcatacaaaaactagacagaagcattctcagaaactactttgtgatgggtgcttacaactcacagaatttaaccgttcttttgacagagcagttttgaaacactctttttgtagaatctgcaactggatatttggactgccttgaggtctttgttggaaacgggaatatcttcacataaaaactagacagaaacattctcagaaacttccttgtgatgtgtgcattcaactcacagagatgaaacttccttttgatagagtagttttgaaacactttctttgtagaacctgcaagcggataattggagtactttgaaatcttctttggaaatggctatatattcacataaaaactagaccgttgcattctcaggaacttctttgtggatgtgtgcattcaacttaccgatttggagcttccttttgataaagcagttttgaaacactctttttgtacagtctgcaaatttatgtttggagcgctttgaggccagtggtagaaaatgaaatatcttcatataaaaactagatagaagcattctcagaaactactttgtgatgtgtgccttcaactcacagagtttcacccttctcttgatagagcacttttcaaaacctctttttgtagaatctgctagtggagaattggagtgctttgaaggcttcattggaaacaggtatatcttcacatataaactagacggaaacattctcagagaattctttgtgatgcgtgcattcaactcacagagttaagccttttttttaatagagcagttttgaaacacactttttgtagaatctgcaagtggaaatttggagcactttgagggctatggtgcaaacggaaacaccttcacaaaaaaactagacagaagcattctcagaaacttcttcacgatgtttgcattcaagtcacagcgttgaaactttcttttcatagagcagttttgaaacactcttgttgtagaatctgcaagagtacatttggagtactttgaaggatacagtggaaaaggaaatatcttcatataaaaactagactgaagcattctcagaaacttctctgtgatgtttgcattcaactcagagagttaaacatttcttttgatagagcagttttgaaacactgtttttgcagaatctgcaagtcgatatttggacggttttgaggccttcgttgataacggtgtatcttcacataaaaactagacagaagcattgtcagaaacttctttgtgatatgtgcattcaactcacagagttgaacgttctttttcatagagcagttttgaaaccctcttggatatttggagtgctttgaagccttcgctgggagcgcgaatatattcacataaaaactagacaaaagcattctcaaaaacttccttgtgatgtgtgtattcaactcacaaaactgaaccttccttttgatacaagagttttgaaacactctttttgagaatatgcacgtggataatttgactacttggaagccttcgttggaaacgggaatttcttcacgtaaaaactagacagatgcattctgagaatttccttgtgatgtgtgcattcaactcacagagttgaaccttccttttgatagagcagttttgaaaccctctttttgtagaatatgaaaatggataattggagttctttgtagtcttcattggaaacgggaatattttcacataaaaactagacagaagcattctcagaaacttctttgcaatgtgtgcattcacctcacagagttgagccttcctttgatagagcagatttgaaacactctttttgtagaatctgcaggtggatatttggagtgctttaaagccttctttggaaacggtaatatcttcacataaaaactagacagaagtattctcaaaaacttctttgtgatgtgtgcattcaactcacacagttgaaccctccttttgctactgcagatttgaaacactctttttgtagaatctgcaagtggatatttgaagccatttcaggcctctggtagaaaaggtaatttctttatctaaaaactagaaagaagcagtctcagaaaccagctagtgatgtgtgcattcagctcagagatttttaacctctcttttgctagagcagttttgaaacactctttttgtagaatctgcaagtggacatttggagcactttaagggctatgttggaaaaggaaataccttcacataaaaactagacagaaacattctcagaaacttctttgtgatgttcacattcacctcacagatatgaaccattgtggaagtcagtgtggtgattcctcatggatctagacctagaaatgccatttgacccagccatcccattactgggtatatacccaaaggactataaatcatgctgctataaagacacatgcacacatatgtttattgtggcattattcacaatagcaaagacttggaaccaacccaaatgtccaacaatgatagactggattaagaaaatgtggcacatatacaccatggaatactatgcagccataaaaaatgatgagttcatttcctttgtagggacatggatgaaattggaaatcatcattctcagtaaactatcataagaacaaaaaaccaaacaccgcatattctcactcagaggtgggaattgaacaatgagatcacatggacacaggaaggggaacatcacattgtgtggacagttgtggggtgcgggaaagggggagggatagcattgggagatatacctaatgctagatgactagttagtgggtgcagcacaccagcatggcacatgtatacgtatgtaactaacctgcacattgtgcacatgtaccctaaaacttaaagtataatcataaaaaaatgaatttttcttttcataaagcagttttgaatcactctttttgtagaatctgcaagtggatatttggattgctttgaggctttcgttggaaacgggaatatcttcacataaaaactagacagaaagattctcagaaacttctttgtgatatgtgcactcaacacagagagttgatcctttcttttgaaagagccattttgacacacactttttgtagattctacaattggacatttagagtactttctgggctatagtgcaaaaagaaatatcttcacatgaaaagtagacagaagcattctcagaagcttctttgtgatgtgtgcattcaactcacagagtttaaccttccttttgattgagcagttttgaaacattctctttgtagaatctgcaagtggttattaggactactttgaggccttcattggaaatgggaatatcttcacataaaaactataaataagcattctcagaaagttatttgtgaattgtgcattcaactcacagaattgaaccttccttttgatagagcagttttgaaacactctttttttatagtatctgcaagtggatatttggagtgttttgaagccttcgttggaaacgggaatatattcacataaaaactagacagaagcattctcagaaactttcctgtgatgtgtgtattcaatgcacagagttgaaccttccttttgatagagcagttttgagacactctgtttgtagaatatgctagtttatatttggagtgctttgaagccttcgttggaaatgtgaatatcttcacattaaaaactagacagaaggattctcagaaactactttgtgatgtgtgcattcaactcacacagttgaaccctccttttgctactgcagatttgaaacactctttttgtagaatctgcaagtggatatttgaagccatttcaggcctctggtagaaaaggcaatttctttatctaataactagaaagaagcagtctcagaaaccagctagtgatgtgtgcattcagctcagagatttttaacctctcttttgctagagcagttttgaaacactctttttgtagaatctgcaagtggacatttggagcactttgagggctatgttggaaaaggaaatattttcacataaaaactagacagaaacattctcagaaacttctttgcgatgttcacattcacctcacagatatgaaccattgtggaagtcagtgtggtgattcctcaaggatctagacctagaaatgccatttgacccagtcatcccattactgggtatatacccaaaggactataaatcatgctgctataaagacacatgcacacatatatttattgtgacattattcacaatagcaaagacttggaaccaacccaaatgtccaacaatgatagactggattaagaaaatgtggcacatatacaccatggaatactatgcagccataaaaaatgatgagttcatttcctttgtagggacatggatgaaattggaaatcatcattctcattaaactattgcaagaacaaaaaaccaaacaccgcatattctcactcagaggtgggaattgaacaatgagatcacatggacacaggaaggggaatatcacactctgggaactgttgtggggtgcgaggaggggggaaggatagcattgggagatatacctaatgctagatgactagttagtgggtgccgcgcaccagcatggcacatgtatacatatgtaactaacctgcacaatgtgcacatgtaccctaaaatttaaagtataatcataaaaaaaatgaatttttcttttcataaagcagttttgaaacactctttttgtagaatctgcaagtggatatttggattgctttgaggccttcattggaaacgggaatatcttcacataaaaactagacagaaagtttctcagaaacttctttgggatgtgtgcattcaacacacagagttgatcctttctattgaaagagccattttgacatacactttttgtagactctactagtggacatttggagtactttctggactatagtgaataaataaatatcttcacatgaaaagtagacagaagcattctcagaagcttctttgtgatgtgtgcattcaactcacagagtttaaccttccttttgattgagcagttttgaaacactcttttgtagaatctgcaagtggatatttggactgatttgaggccttcgttggaaacgggaatatcttcatctaaacactagacggaagcattctcagaaactactttgtgatgtgtccattcaactcacagtgttgaacctttatttttacagagcagctttgaaacacactttttgtagaatctacaagtggatatttggactgcttggaggccttcattggaaacgggaatatcttcacataaacactagacagaagcattctcagaaactactttgtgatgtgtgcattgaaccccctagttgaaccttgctgttgatggagaagttttgagtcaatctttttctataatatgcaagtgtatattcggagtgttttgaagtcttcattggaaacgggaatatcttcacatgagaactagacgaaagcattctcagaaacttctttgtgatgtgtgcattaaactcacagagttgaaatttccttttgattgagcagttttgaagcactctttttgtagaatctgcaagtggatatttggactgatttgaggccttcgttggaaacgggaatatcttcgtctaaaaactagacagaagccttctcagaaactactttgtgatgtgaccattcaactcacagagtcgaacatttcttttgatagggcagctttgaaacacactttttgtagaagctgcaagtggatatttggactgctttgaggccttcattggaaacggaaatatcttcacataaaaactagacaaaagcattctcagaaactactttgtgatgtgtccattgaactcccctagttgaaccttgcttttgatggagaagttttgaatcactctttttgtagaatatgcaaatggatatttggagtgttctgaagccttcgttggaaacgggaatatcttcacatgaaaactagatgaaagcattctcagaaacttctttgtgatgtgtgcattcaactcacagagttgaaccctccttttgattgagcagttttgtagcactctttttgtagaatctgtaagtggatatttggaacactttgaggcttatggttgaaaaggaaatatcttcatagaaaaactagcaagaagtgttctcagaaactactttgtgatgtgtgcttacgactcacagaatttaacctttcttttgatagaggagttttgaaacagtctttttgtagaatctgctagtggataattggagtgctttgaagcctttgttggaaactagaatatcttcacacatgtactagacagaagcattctcagaaacttgtttgtgatgtttgcattcaactcacagagattaacctttcttttgacagagcagttttgaaacactctttttgtagaatctacaagtggacatttggagcactttgagggctatggtggaaaaggtaatatcttcacataagaactagatagaagcattctccgaaacttctttgtgatgtgtgcattcaacgcacagagcttaactttcctttggaaagaacacttttgaaacactctttttgtagaatctgcatttggatatttggactgctttgaagccttcgttggaaacgggaaaatcttcatataaaaactagacagaagcatgctcggaaacttctttgtgatgtgtgcattcaaaccacagagttgaaccctccttctgatagagaagtttcaaaacactctttttgtagaatctgcaagtggatatttggagccctttgaggccttttgtagaaaaggaaatatcttcatagaaaaactagaaagaagcattctcagaaactattttgtgatgcgtgcattcatatcacagaattgaacgtttcttttgatagagcagttttgaaacactctttttgtcaaatctgcaagtggacatttggagaaatttcagtgctaccatggaaaaggaaatatcttcacataaaaactagacagaagcattcgcagaaaagtctttgtgatgtttgcattcaactcacagatttgaaactttcttttcatttagcagttttgaaacaattttttttgtagaatctggaagacgatatttgtactgctttgaccccttcgttggaaacgggaatagcttcacatgaaaactagacagaagcattatcagaaacttctttgttatgtgtgcattcaactcacagagttcaactttccttttgatagggccgttttgaaaaactcttcctgtagaatctgtaagtgtatatttggactggttttaggccttcattgaaaaagggaatatcttcacataaaaactatacagaagcattctcagaaacttctttgtgatgtgtgcattcatcttacagttttgaaccttccgttgaatggtgcagctttgaaacactctttttgtagaatcagcaattggatatttggagcgatttgagccctattgtagaaaaaggaaatattttcatataaaaactagacagaagtattctctgaaactaatttgtgatgtgtgctttcatctcacagagtttaaactttcttttgatagagcagttttgaaacactctttttgcactatctgcaagtggataattggagtcctttgaagcctttgttggaaacgggaatatcttcatatataaactagacaaaagcattctcaaaatctactttgtgatgtgtgcattcaactcacagagattaacttttcttttgatagatcagctttgaaacactctttttgaagaatctgcaagtagacatttggagcactttgagggctctggtggaaaacgaaatatcttcacatgaaaaccagacagaagcattctcagaaacttctttgtgatgtgtgcattcaactcacagagttgaaactttcttttgatagagcagtttttaaacacactttttgtagaatctgcaagttgacatttggagcactttgaggtctatggtggaaaaagatatatcttcacataaaaactagacaggagccttctctgaaacttctttgtgacgttcggattcaactcacagagttgaaactttcttttgatacagcagctttgaaacactctttttgtagaatctgcaggtggatattttgactgctttgaggccttcgttggaaaagggaatatcttcacataaaaactagacagaagctttctcagaaacttctttgtgatgtgtgcattcaactcacagagttgaaccttccttttgatagagcagttttgaaacaatatttttgtagaatctgcaagtggatatttggagtgctttgaagccttagttggaaacgggaatatcttcatataaatactagacagaagcattctcagaaccttctttgtgatatgtgcattcagctcacagatttgaaccatccttttgatagagaagttttgaaaccctctatttgtagaatctgcaggtggatatttggagcattttgagtcctactgtagaaaaggaaatatcttcatataaaaactagaaagaagcattctcagaaagtactttgtgatgtgtgcattcaactcacagaatttaaactttcttttgatagagcagttttgaaacactctttttgtagaatctgcaagtggataattggagtgctttgaagccttcattggaaacgggaatatcttcacataaaaactagacagaagcattctcagaaactgctttgtgatgtgtgcttgcagctcacggaatttaatctttcttttgatagggcagttttgaaacactctttttgtagaatctgcaagtggataattggattgctttgaagccttcgttgcaaacgggaatatctttaaataaaaatttgtaatgcttacattcaactcacagagtgtaacctatcttttagtagagcagttttgaaacactttttttgtagaatctacaagtgcacagttggagcactttgagggctatagtggaaaaggaaatatcttcacataaaaactagatagaagcattctcagaaagttctttgtgatgtttgcattcaattcatagagttgaacatttcttttgatagagcagttttcaaaaactctttttgtagaatctgcaagtggacatttagagtactttgaggcctatggtggaaaaggaaatatcttcacataaaaattagacagaagcattctcagtaatttctttctgatgtatgcattcaactcagagagttgaacatttcctttgatagaatagttttgaaacactccttttgtagaatctgcaagtggatatttggactgctttgtcgccttcgttggaaatgggaatagcttcacataaaaactagacagaagcattctcagaaacttctttgtgatatgtgcattcaactcacagattttaaccattcttttgatagagccgttttgaaacacttcttgtagaacctggaagttgataattggagtgctttgaagcctccgttgcaaacgggaatatcttcacataaaaactagacctaagcattctgagaaacatttatgtgatgtgcgcattcaactcacagagttgaaccctccttttgatagggcagtattgaatctctctttttgtagaatctggaagtggatatttggagcacattgaggtctatggtagaaaagggaatatcttcacataaaaactagacagaagcattctcagaaactagtttgtgatgtgtgcattcaactcacagagttgaacctttgttttgatagagcagttttgaaacactctttttgtagaatctgcaagtggatatttcgactgctttgaagccttcgttagaaacaggaatatcttcacataaaaactagacagaatcatttcagaaactactttgtgatgtttgcattcatctcagagagttgaacctttcttttgatagaacagttttgaaacaccctttttctagaatctgctggtggacatttggagtactttgtggtcgatggtgaaaaggatatatcttcacataaaaactagacaggaacattctcagaaacttctttgtgatgtttgctttcaacacagggagttgaaactttctgttgatagaggagttttgaaacactatttttggagaatctgcaagtgaatatttagaccactttgaggccttcattggaaacgggaatattttcacataaaaactagatagaagcattctcagaaacttctttttgatgtttgcattcaattcacagaattgaaccttccttttaattgaaaagttttgaaacactctttttgtagaatatgcaattggatatttggagtgctttgaagccttcattagaaacggaaatatcttcacataaaaactagatagaagcattctcagaaacttctttgtgatgtgtgtatacaactcacagatttgaacctttcttttgatacagcagtttttaaacactctttttgtagaatctgcaactgtatatttggagtgctttgaagacttcattggagacgggaataacatcacataagaactagatggaaacattctcagaaacttcttcttgatgtgtgcattcaacctacagagttgaagcctccttttgatagagcagttttgaaacactctttttgtagattctgcaagtggatatttggggtgctttgaagagtttgtcggaaacgtgaatatcttcacataaaaactagtcagaagcattctcaaaaattactttgtgatgtgtgcattcaactcacagagtttaacctatttttgatagagcagttttgaaacactccttttgtggaatcagcaagtggacatttgtagcactttgagggctttggtggaaaaggaaatatcttcacataaaaactagacagaagcaatctcagaaacttctgtgatgtttgcattcaactcacagattggaacatttcttttgatagagcagttttgaaacgctctttttgtagaatctgcaagtggacattaggaacactttgagtgctagagtggaaaaggagatatcttcacataaaaactagacagaagcattctcagaaacttctttgtgatgtttgaattcaactcagagtgttgaacatttcctttgatagagcagttttgaaacactctttttgtagaatctgcaagtggataattggagtactttgaagcgttgttggaaacggtaatatcttcacataaaaactagacagaagcattctcagaaactactttgtgatgtgtgcattcaactcacagagttaaaccttccttttgatagagcagttttgaaacactctttttatagtatctgcaagtggatatatggagtgctttgaagccttcattggaaatgggaatatattcacataaaaaatatacataagcattctcagaaacttccttgtgatgtgtgccttcaactcacagagctgaaccttccttttgataaagcagttttgaaacactctttttgtggaatctgcaagtggataattggagtaattttaagcattgttggaaacgggaatatcttcacataaatactagacagaagcattcttagaaacttctttgggatgtgcgcattcaactcacagagttgaaccctacttttgatggagcagttttgaaacgctctttttgtagaatctgcaagtggatatttggagtgctttgaggcctatggtagaaaaggaaatatgttcatataaaaactagacagaagcattctcagaaattactttttgatgtgtgcattcaacttacagagttgaacctttcttttcataggacagttttgaaacactatttttttagtgttggcaagtggatatttggactgctttgaggcctttgttggaaacaggaatatcttcacataaaaactagacagaggcattctcagaaacttctttgtgatgtgtgcattcaactcacagaattgaaccttccttttgatagagcagttttttcttcttttctttatttattatgattatactttatgttttaggttacatgtgagcaatgtgcaggttagtaacgtatgtatacatgtgccatgctggtgcgctgcacccactaactagtcatctagcattaggtatatctcccaatgctatccctccccctttcccgcaccccacaactgtccacacaatgtgatgttccccttcctgtgtccatgtgatctcattgttcaattcccacctctgagtgagaatatgcggtgtttggttttttgttcttatgatagtttactgagaatgatgatttccaatttcatccatgtccctacaaaggaaatgaactcatcattttttatggctgcatagtattccatggtgtatatgtgccacattttcttaatccagtctatcattgttggacatttgggttggttccaagtctttgctattgtgaatagtgctgcaataaacatacatgtgcatatgtctttatagcagcatgatttatagtcctttgggtatatacccagtaatggtatggctgtgtcaaatggtatttctaggtctagatccctaaggaatggccacactgacttccacaattgccgaactagtttacagtcccaccaacagtgtaaaagtgttcctatttctccacatcctctccagcacctgttgtttcctgactttttattgattgccattctaactggcatgaaatggtatctcattgtggttttgatttgcatttctctgatggccagtgatggtgagcatttgttcatgtgttttttggctgcataaatgtcttcttttgagaagtgtctgttcatgtcctttgcccactttttgatggggttgtttgtttttttcttgtaaatttgttagtgttcattgtagattctggatattagtcctttgtcagataagtaggttgtgaaaattttctcccactttgtaggttgcctgttcactctgatgctagtttgttttgctgtgcagaagctctttagtttaattagatcccatttgtcaattttgtcttttgttgtcattgcttttggtgttttagacatgaaatccttgcccatgcctatgtcctgaatggtaatgcctaggttttcttccagggtttttatggttttaggtctaacatttaagtctgtaatccatcttaaattaatttttgtataaggtgtaaggaaggaatccagtttcaggtttctacatatggctagccagttttctcagcaccatttattaaatagggaatcctttccccattgcttgtttttctgaggtttgtcaaaggtcagatagttgtagacatgcggcgttatttctgagggctctcttctgttccattgatctatatctctgttttgatatcagtaccattctgttttggttactgtagccttgtagtatagtttgaagtcaggtagtgtgatgcctccagctttgttcttttggcttaggattgacttggtgatgcgggctcttttttggttccatatgaactttaaagtcgttttttccagttctgtgaagaaagtcattggtagcttgagggggatggcattgaatctgtaaattaccttgggcaatatggctattttcacgatattgattcttcctacccatgagcatggaatgttcttccatttgtttgtatcctcttttatttctttgtgcagtggtttgtagttctccttgaagaggtccttcacatcttttgtaagttggattcctaggtattttattctctttgaatcaattatgaatgggagttcactcatgatttggctctctgtttgtatgttggtgtataagaatgctgtgatttttgtacattgattatgtatcgtgagcctttgctgaagttgcttatcagattaaggagactttgggctgatacaatggggttttctagatatacaatcatgtcgtctgcaaacagggataatttgacttcctcttttcctaattgaatacccgttatttccttcttctgcctaattcccctggccagaacttccaacactatgttgaataggagtggtgagagagggcatccctgtcttgtgccagttttcaaagggaatgcttccagtttttgcccattcagtatgatattggctgtgggtttgtcatagatagctcttattattttgagatatgtcccatcaatacctaatttattgagagtttttaacatgaagggttgttgaattttgtcaaaggctttttgtgcatctatagagataatcatgtggtttttgtctttgttctgcttatatgctggattacatttattgatttgcgtatattgaaccagccttgcaccccagggatgaagcccacttgatcatggtggataagctttttgatgtgctgctggatttggtttgccagtattttattgaggatttttgcatcaatgttcatcaaggatattggtctaaaattctcttttttggttatgtctctgcctggctttggtatcagaatgatgcttgcctcataaaatgagttagggaggattccctcttttctattgattggaatagtttcagaaggaatggtaccagttcctccttgtacctcttgtagaattcggctgtgaatccatctggtcctggtttctttttggttggtaaactattgattattgtgacaatttcagttcctgttattggtctattcagagattcaacttcttcctggtttagtcttgggagagtctatgtgtcgaggaatttatccatttcttctagattttctagtttatttgcatagaggtgtttgtagtattctctgatggtagtttgtatttctgtgggatcggtggtgatatcccctttatcattttttattgcatctatttgattcttctctctttttttctttgttagtcttgctagcggtctatgaattttgttgatcctttcaaaaaaccagttcctgtattccttaattttttgaaggttttatgtgtctctgcttccttcagttctgctctgattttagttatttcttgccttctgctagtttttgaatgtgtttgctcttgcttttctagttcttttaattgtgatgttagggtgtcaattttggatctttcctgctttctcttgtgggcatttagtgctatatatttccctctacacactgctttgaatgcaacccagagattctggcatgttgtgtctttgttatcattgatttccaagaatatctttatttctggcttcatttcattatgtacccagtagtcattcaggagcaggttgttcagtttccatgtagttgagcggttttgagtgagattcttaatcctgagtttgattgcactgttgtttgagagacagtttgttataatttctgttcttttacacttgctgaggagagctttacttccaagtatgtggtcaattttggaataggtgtggtgtggtgttgaaaaaaatgtatattctcttgatttggggtggagagttctgtatatgactattaggtccgcttgatgcagagctgagttcaattccttggtatccttgctgactttctgtctcattgatctgtctaatgttgacagtggggtgttaaagtctcccattattaatgtgtgggagtctaagtttctttgtaggtcactcatgacttgctttatgaatctgggtgctcctgtattgggtgcatatatatttaggatagttagatcttctttttgaatcgatccctttatcattgagtaatggccttctttgtctcttttgatctttgttggtttaaagtctgttttatcagagactaggattgcaacccctgccttctttgttttccatttgcttggtagctcttcctccgtccttttcattttgagcctatgtgtgtctatgcccgtgagatgggtttcctgaatacagcacaatgatgggtcttgactctttatccaatttgccagtctgtgtcttttaattggaacgttttgcccattcacatttaaagttaatattgttatgtgtgaatttgatcctgtcatgatgttagctgtttattttgctcgttaattgatgtagttttttcctagtctcgatggtctttacatttttgcatgattttgcagcagctggtactggttgttcctttctatgtttaacgcttccttcaggagctcttttagggctggcctggtggtgacaaaaatctctcagcagttgcttgtctaaaggattttatttctccttcacttatgaagcttagtttggctgtatgtgaaattctgggttgaaaattcttttctttaagaatgttgaatattggcccccactctcttctggcttgtacagtttctgccaagagatctgctattagtctgatgggcttccctttgagggtaacccaacctttctctctggctgcccttaacattttttccttcatttcaactttgctgaatctgacaattatgtgtcttggagttgttcttctcgaggagtatatttgtggcgttctctgtatttcctgaatctgaatgttggcctgccttgctagattggggaagttctcctggataatatcctgcagagtgttttccaacttggttcctttctccccatcactttcaggtataccaatcagatgtagatttggtcttttcacatagtcccatatttcttggaggctttgtttttttctatttattcttttttctctaaacttcccttctcacttcatttcatttatttcatcttctatcactgattccctttgttccagttgattgcatcggctcctgaggcttctgcattcttcacgtagttcttgagacttggttttcagttcctttaagcagttctctgtatttgttatcctagttacacattcttctaaatttttttcaaagttttcaacttctttgcctttggtctgaatgtcctcccatagctcggagtaatttgatcatctgaagccttcttctctcagctcgtcaaagtccttctatgtccagctttgttccattgctggtgaggaactgcattcctttggaggaggagaagccctctgctttttagagtttccagtttttctgctctgttttttttcccatctttgtggttttatctacttttggtctttgatgatggtgatgtacagatgggcttttggtgtggatgtcctttctgtttgttagttttcctcctaacagacaggatcctcagctgcatgtctgttggagtacccagccttgtgaggtgtcagtatgcccctgctggtggggacctctcagttaggctgctctcgggtcaggggtcaaggacccacttgaagaggcagtctgcctgttctcagacctccagctgcatgctgggagaaccactgctctcttcaaagctgtcagacagggacatttaagtctgcagaggttactgctgtctttttgtttgtctgtgtcttgcccccagacgtggagcctacagaggcaggcaggcctccttgagctgtggtgggcttcacccagtttgagcttcctggctgctttgtttacctcagcaagcctgggcaatggcgggtgcccctcccacagcgtccttgcccccttgcagtttgatctcagactgctgtgttagcaatcagggagactccctgggcgtaggaccctcggaggcatgtgtgggatataatctcctggtgcaccattttttaagcccattggaaaagtgcagcattcgggtgggagtgacccaattttccaggtaccctctttcaccattttctttgactaggaaagggaactccctgaccccttgcacttcccaagggaggcaatgccttgccctgctttggctcatgcacggtgcacgcacccatgagagagcagttttgaaacaccctttttgtagaatctgcaagtggatatttggagagctttgagtcctatcatgcaaagggaaataacttcacataaaaaatagacagaagcattctccaaaacacctttgtgatgcttacattcaactcacagaggtgaacctttcttttgatagagcagttttgaaacactcttttttttagaatctgccattggttatttggagcgctttgaggcctttggtggaaatgggaatatcttcagataaaaaccagacagaagcatgctcagacactactatgtgatgtttgcattcagctcacagagttgaacctttttgatagagcagttttgaaacactctttttgtagtttctgcaagtggatatttggactcctttgaggacttcgttggaaatgggaacatcttcacataaaactagacagaagtattctcacaaacttctttgtgacgtgtgcattcaactcacagagttttaccttccttttgatataacagttttgaaacactctttttgtagaatctgaaagcggatgtttggagtgctttgaggccttcagtgggaatgggaatatcttcacataaaaaacagcagaagcattataaaaaacgtctttgtgatgtgttcattgaatgcagagagttgaacgttgcttttggtagagtagttttgaaacactctttttgtaaaatctgcaggtggatatttggagcactttgaggcctatggtggaaaaggaattatcttcacacaaaaactagacagaagcattctgagaatcttctttgtgatgcttgcattgaactcacagtgttgtaccttccttttgatagagcagttttgaaacactctttttgtagaatctgcaagtggacatttggagagttttgaggcctgtggttgaaaaggaagtatcttcatataaaaactagagagaagcattatcagaaacttctttgtgatgtatgcattcaactcacagagttgaaccttccttttgatagaacagttttgaaacactgtttttgtagtatctgcaagtgaatatttgaaatgctttgaggcctactgcggaaaaggaaatatcttcacataaaaactagacagaagcattctcagaaacttctttgtgatgtgtggattcaactcacagagttgaacctttcttttgatagagcagttttgaaacagtctttttgtagaatctgcaagtggatatttgaagcaccttgaggcctatggtaaaatagcaaatatctttacgtaaaactaaacacaagcattctcagaaatgctttgtgatgcttgcattcaactaacagttttgaaccttccttttgatagagcaattttgaaaatctttttgtagaatctgtaagtggatattcagagcgctttgaggcctatggtggaaatgggaatatcttcacataaaaagttgacagaaacattctcagaaactactttgtgatgcgtgcattaaactcagagagttgaacgttactttcaatagagcagtttggaaacactctttttgtagaatctgcaagtggatatttggagcgctttgaggcctatggtagaaaaggaaatagcttcatataaaaactagacagaagcgttctcagaaacttctttgtgatatatgcactcaactcatagagttgaaccttccttttgatagagcagctttgaaacactctttttgtagaatctgccagtggatatttggactgctttgaggccttcggtggaaacgggaatatcttcacttaaaaactagacagaaggattctgagaaacttctttgtgatgtgcacattcaacccactgagttgaaactttctattgtttgagcagtttggaaacagagttttgtaatatctgcaaatggataattggagatctttgacacctacggtggaaaatgaaatatcttcacataaaaactagacagaagatttcttggaaacttctttgtaatgtgtgcattcatctcacagagttgaacatttctttttttgagcagttttgaaacactctttttgtagaatctgcaagtggatatttggagccctttgtttcctatagtggaaaaggaaatatcttcacttaaaagtagacagaagcattctcagaattttctttgtgatgtgtacattcatctcacagagttgaacctttcttttgattgagcagttttgaaacactctttttgtagaatcagcaagtggatatttcgaatgctttgcgacctatagtggagaaaggaataccttcacataaaaactagacagaagcattctgagaaactattttgttatgtgtgcattcatctcagagtgctgaactgtttttttatttgagcggttttgcaacactctttttatagaatctgcaagtggatatttggagaattttgccacctatagtgggaaaggaaatatcttcacataaaaacaagacaaaagcattctgagaaactcctttgcaatgtgtgcattcatctcagagaatagaacttttcttttgattgagcagttttgaaacactctttttgtagaatctgcaagggtgtatttggggcgttttgaggcctgtggcggaaaaggaaatttctttacataaaaactctgcagaagcattctgagtcacttctttgtgatgcgtgcattcatctgatgtagttgaacctttcttttgattgagtagtttggaaacactctatttgcaggatgtgcaagtagatatttggagcaccttgatgcccatggtggaaaacaaaatatcttcacataaaaactacacagaaacattctgagaaacttatttgctatgagtgcattcatctcacagagttgaaacttttttttgattgaacagttttgaaacactctttttgtagaatgtgaaagttgatattttgagcgctttgaggcctgtagtggaaaaggaaatatcttcacataaaaactacacagaagatttctgagaaaattctttgtgatttgtgcattcaactcacatatttgaacctttcttttgataaagcagttggtaaacagtctttttgtagtatctgtaaatggaaatttggagcactttgaggcctatagtggagaaggtaatatctacatataaaaactagacagaatcattatgagaaacttctttgtgaagtgtgcattcatctcacagagttgaaccttacttttcattgagcagttttgaaacactctatttgtaggatctgcatgtggatatttggcgcattttcagtctatagtggacaaggaaatatcttcacataaaaactagacagtagcattctgagaaacttctttgtgatgtgtgcattgatctcacattgtgaaagtttctttcgattgagtactttggaaacagtctttttgtagtatctgcaaatggatatttggggcgcttaaaggcctatagtggaaaaggaaatatcttcacaaaatagatagacagaagcattctgagaaacttcattgtgctgtgtgcattcatctcagagatttaaacttttgttttgattgtgcagttttgaaatactctttttgtagaatctgcaagtggatatttgtagccatttgcggcctatagtggaaaagcaaatatcatcacataaaaacaagacagaagcattctgagaaacttctttgtgatgcatgcatgcatctcacagagttgaagctttcttctgattgagcagttttgaaacagtctttttgtaaagtctgcatgtggatatatggagagctttgggcctatagtggaaaaggaaatattttctcattaaaactggacaaaagcattctgagaaatttttttgtgatctgtgcattcaactcacagatttgaacttatcctttgattgatcagtttggaaacattctttttgtaatatcagccagtggatatctcaagcgattgagacttatagtggaaaaggaaatatcttcaggaaaaactagacagaagaattctgataaacttctttgtgatgtgtgccttcatctcacagtgttgaacctttcttttaattcagcagctttgaaaaagtctttttgtagaatctgcatgtggatatttggagtgctttgctgcctatagtgaaaaaggaaatatcttcacataaaatctagacagaagaagtctgagaaacttccttgtgatgtgttcattctccacacagatttgaaattttcctttgattgagcaattttgaaacactcttttttttgtgcaagtggatatttggagcacttttaggcatatcatggaaatggaaatgtcttcatataaaaactagacataaaaattccgagaaacttgtttgtgatgtgtgccttcaactcacagtgttgaaactttcttttgattgaagagtttggaaacactcttttgtagtatcggcaagtggatatttggatcgtttcacggtctaaagagggaaagaaaatattttcacataaaaactagacaaaagcactctcagaaacatctttgtgatgtgttcattcatctcacagggttgaaccaatcttttgattcagtagttttgaaacactctctttgcagtatctgcaagggaatatttggagcgctatgaggcctatggtggaaagcaaatatctttacataaaactagacagaaacattctgagaaacttctttgtgaagtgtgcagtgatctcacagatttgaacctttgttttgatttagctattttgaaacactctttttgtagagtctgcaagtggatatttggagcactttgtggcctacggtagaaaattaaatatcttcacacaaaaactagcaagaagcattctgagaaacttctttttggtgtgtgcatgcaactcaaagagttgaacctttcttttgattgagcagtttgtaagcattctttttgtagcatctgcaaatgtatatttagagtgccttaaggcctacagtggaaaaggaaatatcttcacataaaaactagatggaagcattctgagaaactactttgtgatgtgtgcattcatttcaaagagtttaacctttcttttgattgagcagttttgaaacactctttttgtagaatctgcaaggggatatttgcagcgatttttggcgtatattggaaaaggaaatatcttcacataaaacctagagagaagcattctgagaaacatcttcctgaagtgtgcattcaacttacagagatgaacctttcttttgattgagcagtttggaaacactctttttgtagtatctgcaaattgatattttgagtgctttgaggcttatggtggaaaaggacatatcttcacataaaaaccagacagaagaattctcagaaacgtctttgtgatatgtgcattcatctcacagagttgaaactttcttttcgttgagcagttttgaaacccttattttgtagaatctgcaagtgtatattaggagagcttttctgtctatggtggaaaaggaaatatcttcacataaaagctagactgaaacattctgagaaacttctctgtgatgtgttcattcatctcagatagattaatctttctttttattgagcatttttgaaccactcttttttaagtatctgcaagtggatatttggagcacattgtggcctatagtggaaaaggaaatatcttcacattaaaactagactgaagctttctgagaaacttctttgtgatgtatccattcatctcacgagatgaacatatcttttgattgagcagtttggaaacactctttttgtagaatctgcagttggatatttggagctcttgaggcctatgttggaaaaggaaatatcttcacataaaaaccagacagaagcattctgataaattgctttgtgatgtttgccttcaactcacagagttggatctttcttttgattgagcagttaagaattattctgtatgtagtatctgcaattggatatttggagagctttggggcctatagtggaaaaggaaatatcttcacagaaaaactagacagtagcattctgagaaaattctttttgatgtgttcattcatctcacgagatgaacatttttttttgactgagcagttttgaaacactgtttttctagaatctgcaattggatatttggtgcgctttgaggcatatggtgaaaaaggaaatatcttcacattaaaaatagacagaagcactctgagaaacttttttgtgatgtgtgcattcatctcgcagtgttaaaactttcctttgattcagcaattttgaaacactcttcttgtagaatctgtgagtggatatttggaacccattcaggcatatagtggaaaacgatatctcttcacatagaaactagacaaaaacattctgagaaattaccttgtgatgtgcactttcaactcacagagttgaacttttcttttgattggggagtttggagacagtctttttatagtatctgcaaatggatatttggagagcttacagtcctacggtggaaaaggaaatatctttacatgaaagctagacagaagaactctgagaaacttccttgtgatgtgtgcattcatctcacagagttaaacctttcttttcattgagcatttttaaaacactcttttttacaaatctgcaattggagatttgagtgctttgcggcctatagtgtaaaagaaaataccttcaaataaaaactagacagaagcattctgggaaacttctttgtgatatgtgcattcatctcacagagttgaaactttcttttgattgtgcagttttgaaacactctttttacagaatctgcaattggatatttggagtgctatgaggcctattgtggaaaaggaaatatcttcacataaaaactagacagaagcattctgagaaagttctttgtcatgtgtgtattcacctcacagtgttgcaaatttcttttgattgagcagtttggaaacagtctttatgtactatctgcaaatggatattttgagcgctttgtggcctatagaggaaaaggagttatcttcatataagaactagacagaagcattctgagaatcttctttgtgatgtgttcattcgtctcacagtgttgaagctttcttttgattgacagttctgaaacactttttttttagaatctgcaagtggatatttggagcgctttgtggcttatattggaaaaggaaatatcttcaaataaaaactagacagaggtattctgagaaacttctttgtgatgtgtgcactcatctcacagagttgaacctttattttgattgagcagttttgaaacactctttttgtagaatctgcaagtggatatttggagcgcttggctgcctatggtgaaaaagaaaatatcttcacgtaaaaacaagacagaatcattctgagaaactcctttgtgatgtgtgcattcatctcacacagttgaacatctcttttcattgggaagttttgaaacactctttttgtagaatctgcaagtggatattttgagcgatttgaggcctatggtggaaaaggaaatatcttcacctaaaaactgtacagaagcattctgagaaacttctttgtgatgtgtgcattcaactcacagagtggaacctttcttttgcttgagcagtttggaaacattctttatgtagaatctgcaaatggatatttggagagctttgaggcctatggtataaaaggaaatatcctcacataaaaactagcaataagcgttctgagaaactcctttgtgatgtgcacatacaactcaaggagtggaaccttactttggattgagcaatttgtaagcattcttttgtatttatttttaatttactttacgttttagggtacttgtgcacaatgtgcatgttagttacatatgtatacatgtgccatgctggtgtgctgcacccattaattcatcatttagcattaggcatatctcctagtgctatctccccacttcccccaccccataacagtccccagagtgtgatgttcccctttctgtgtccatgtgttctcattgttcaattcctacctatgactgagaacatgcattgtttggtttttttgtccttgagatcgtttactgagaatgatgatttctgaattaatccgtgtccctacaaaggacatgaactcatcattttttatggctgcatagtataccaaggggtatatgtgccacattttcttaatccagtatataattgttggtcatttgggttggttccatgtctttgctattgtgaatagtgctgcaataaacttacatgtacatgtgtctttatagcagcatgatttatactcctttaggtatatacccagtaatgggatggctgggtcaaatggtacttctagttctagatccttaaggaatcgccacactgacttccacaagggttgagctagtttacagtcccaccaacagtgtaaaagtgttcctatttctccacatcctctccatcacctgttgtttcctgactttttaatgattgctattctaactggtgtgagatggtatctcattgtggttttgatttacgtttccctgatggccagtgatggtgagcatttgttcatgtgttttttggctgcataaatgtcttcttttgagaagtgtctgttcatgtcctttgcccactttttgatggggttgtttgatttttttcctgtaaatttgtttgagctcattgtagattctggatattatccctttgtccgatgagtaggtagtgaaaattttctcccattttgtaggttgcctgttcactctgatggtagtctcttttgctgtgcagaagctctttaatttaatttgatcccatttgtcaattttgtcttttgttgccattgcttttggtgttttagacatgaagtccttgcccatgcctatgtcctgaatggtaatgcctaggttttcttctagggtttttatggttttgggtctaacatttaagtctttaatccatcttaaattaatttttgtataaggtataaggaaggaatccagtttcaggtttctacatatggctagccagttttctcagcaccatttattaaatagggaatcctttccccattgcttgtttttctgaggtttgtcaaagatcagatagttgtagatacacagcattatttctgagggctctcttctgttccattgatctatatctctggtttgttaccagtaccatgcagttttggttactgtagccttgtagtatagtttcaagtcaggtagcatgatgcttccaggtttattcttttggattaggattgacttggtaatgtgggctccttattggttccatatgaattttaaagtagtttttttccaattctgtgaagaaagtcattggtagcttgatgggaatggcattgaatctataaattaccttggtcagtatggccattttcacattattgattcttcctatccatgagcatggaattttcttccatttctttgtatcctcttttatttccttgtgcaatggtttgcagttctccttgaagaggtccttcacgtcccttgtaagttggattcctaggtattttattctctttgaagcaattatgaatgagagttcactcatgatttggatctctgtttgtctgttattggtgtataagaattcttgtgatttttgtacgttgattttgtatccacaacataccagaatctctgggacacattcaaagcagtgtgtagagggaaatttatagcactaaatgcccacaagagaaagcaggaaagatccaaaattgacaccctaacatcacaattaaaagagctagaaaaacaagagcaaacacattcaaaagctagcagaaggcaagaaataactaaaatcagagcagaactgaaggaaatagagatacaaaaaaccctacaaaaaattaatgaatccaggagctggttttttgaaaggatcaacaaaattgatacaccactagtaagactaataaagaagaaaagagagaagaatcaaatagatgcaataaaaaatgataaaggggatatcaacaccaatccaacagaaatacaaactaccatcagagaatactacaaacacctctacacaaataaactagaaagtctagaagaaatggataaattcctcgacacatacaccctcccaagactaaactatgaagaagttgaatcaatgaataggtcaataagaggccctgaaattgtggcaataatcaaaagcttatgaaccaaaaagagtccaggaccagatggattcacagccgaattctaccagaggtacaaggaggaactgatacctttctttatgaaactattccaatcaatataaaaagagggaatcctccctaactcattttatgaggccagcatcttcctgataccaaagcctggcagagacacaaccaaaaaagagaattttacaccaatatcctttagaacattgatgcaaaaatcctcaataaaatactggcaaaccaaatccagcagcacatcaaaaagcttatccaccatgatcaagtgggcttcatccctggggtgcaaggctggttcaatatatgcaaagtaataaatgtaatcccgcgtataaacagaaccaaagacaaaaaccacatgattatctcaatagatgcagaaaaggcctttgacaaaattcaacaacccttcatcctaaaaactctcaataaattaggtattgatgggacgtatctcaaaataataagagctatctatgacaaacccacagccaatatcatactgaatggacaaaaactggaagcatttgctttgaaaactggcacaagacagggatgccctctctcaccactcctattcaacatagtgttggaagttctggactgagcaatttggcaggagaaggaaataaagagtattcaattaggtaaataggaagtcaaattgtccctgtttgcagatgacatgattgtatatctagaaaaccccattgtctcagccccaaatctccttaagctcataagcaacttctgcaaagtcactgtaagcattctttttggagcatctgcaaatgtatatttggagcgccttgatacctttagtgaaaaaggaaatatcttcacataaaactagacagaagcattatgagaaacttcttagtgatgtctgcattcatctcaaagaagtgaagctttcttttgattaagtagttttgaaatcctctttttgtagaatctgcaagtggatataaggagagctttgtggtctatagtggaaaaggatatatcttcacgtaaaaacgagacagaaacattctcagaaacttttttgtgatgtgtgcattcatctcacagagctgaaactttcttttgatagagaagtttgaaacactattttttaaggttctgcaagtggatatttggagcactttgtggcctagagtggaaaaggaaatatcttcatattaaaaatagagagaagcattctgagaaacttcttcatgatgtgagctttcaactaacagagttgaacctttctttagattgaccagtttggaaaccctctttttgtagtatctgcaaatggatatttggagcgctttcagtcctatgttggaaaaggaaatatcttcacataaatacaagacagaagcattctcagaaagtactttgtgattgagcattcaactcacagagttgaaacgttcttttgattgaacagtttggaaacaggcttttgtagtacctgcaaatggatatttggagcgcgttgaggcctatagtggaaaaggaattatcgtaccataaaaactatacagaagcgttctgaaaaacttcttttctgtgtgtgcattcatctcacagagttcaacttttgttttgattgaacagcttggaaacactccttttgtagaatctgcaagtggatatttggagcccttcgaggcctattgtggaaaaggaaatatcttcacataaaaaccacacagaagcattctgataaacttctttgtgatgtgagcattcatctcatgtagttgaaacttgtttttgattgagcagatttgaaacactctttttgtagaatctgcaattggatatttggaatgctttgcagcctttagtggaaaagcaaatattttcacataaaaccaaaaaagaaacattctgggaaacttctttgtgatatgtgcattcatcccacagagttgaacttttcatttgattgagcacttctgcaacactcttgttgtaggatctgcaaattgatatttggagcgctttgaggcctatggtggaaaaggaaatatcttcccataaaaactagacagaagcattctcagaaatttatttgtgatgtgtgcattcatctcacagagttgattatttctttcgattgagcagcttggaaacggctttttgaagaatcagaaaatgaatatttggagcgctttgaggcctgtggtggaaaatgaaatatctccacataaaaactagacagaagcattctgataaacttctttctgacgtgtgcattcatctcacagagttgaaactttattttgattgagcagttttgaaacactctttttgtaatatctataagaggatattttgagtgctttgaggcctatggtgaaaaaggaaatatcttcacataaaaccacagagcagcattctgggaaactcctttgtgatgtgtgcattcaactcactgagttgaacctttcttttgatagagcagtttggaaacagtctttttgcagtatctgaacatagataattggagcgctctgaggcctttggtggaaaagtaaatatcttcacataaaaactaggtgctacattctgagaatcttcttagtgatgtgtgcatacaactcacagagttgaatctttctactgattgagcatttttgaaacactccttttgtggaatctgcaagtgcatattcacagcagtttgcattaagtagtgtaaacggaaatatcttcaaataaaaactagacagaaggattctgagatacttttttgtgatgagtgcattcatctcacagatttgtacatttcttttgattcagcagtttttaaacactctttttctagtatctgcaataggatattaggagtgctttgaggcctttgttggaaaaagaaatattttctcataaaaactacagagaagcattctgagaaacttctttctgatgtgtgcattagactcacagagttgaaactttcttttcattgagcagttttaaacccactttttgttgaatctgcaagtggatatttggagcactttgaggcctatggtggaaaaggaaatatcttcccataaaaactagacagaaacattctgagaaacttctttgtgatgtgtgcattcatctcacagagttgaacctttattttgatttagccgttttggaacattctttatgtaggttctgtaagtggatatttagagcgctttgcggcctatagtggaaaaggaaatatcttcacataaaagctagacagaagcattttgagaaacttctttatgatgtgtgcattcttctcacagagttcaacctttctttggattgagcagttttgaatccctttttgtaggatctgcatgtggatatttggaatggtttgaggcgttttgtggaaaaggcaatatcttcacatataaagttgacaggggcattctgagaaacttctttgtgatgtttgcattccactcacacagttgaaactttcttttaattgagcagtttgaaacactctttttgaagtatctgtaagtacatatttggatcactgtgcggcctatgtttgaaaagttaatatcttcacataaaaactacacaaaagcattctgagaacgtcttcatcatttgtgcattcactcacagatttgaaattttcttttgattgggcagtttggaaacagtctttttgtagtatctgtaaatggatattttgagtggtttcaggcctatagtggaaaagaaaatatcttcacataaaaactagacagaagcattctgagaaagttctttgtgatgtcttcattcctctcagatagttgaaactttcttttcattgagcagttttgaaacactcattttctagaatctgcaagtggatatttgaatcactttcagtcctactgtgtaaaaggaaatatcttcacataagaactacagaaaagcagtctcagaaacttctttgtgatgtgtgcattcctctcacagagttgaacttttcttttgattgagcagtttggaaacacacactttttagaatctgcaagtggatatttggagcactttgaggcctatgtggaaaaggaaatatcctcaaataaaaactacacagaagaattcttagaaatttctatgtaatgtgtgcattcacctcatacagttgaacgtttcttttcattcagcagcttggaaacactttctttgtagaatctgcacatggatatttggagtgctttgtggcctattgtggaaaaggaagtgtcttcacataaaacctacacagaagcattcagagaaacatttttatgatgtgtacattcatctcacagagttgaacttttcttttgattgagcagttttgaaagactcttttagtagaatctgcaagtgaatatttggtgcctcagaggccaattgtgtaaaaggaaatatcttcacataaaaactacacagaagcattctgagaaacctctttgtgatgtgtgcattcatctcacagagttgaaccttgcttttcattaagcagtttggaaacactatttttgtagagtctgcaagtggatatttgaagcgctttgagaactattgtggaataggatatatcttcaaatgaaaattacacacaataattctgagaaacttctttgtgatgtgtgcattcatctcaaagagttgaacctttcttttgaatgagcagtttggaaaaaatctttttgtacattctgcaaatggatatttggagcactttttggcctattatggaaaaggaaatatcttcatgtaaaaactacatagaagcattctgagaaacttctttgcgatgtgtgcattcatctcacagagttgaacctttcttttgattgattagtttggaaacactctttttgtagaatctgtaagtggatatttggattgctttgaaggttatggtggaaaaggaaatatcttcacataaaaactacacagaagcattccgagaatcttctttgtgatgcttgcattcaacacacagagttgaaactttcttttgattgagcagtttggaaacacactttttgtagaatctgcaagtggatatttggagccctttgatgcccatttcagaataggaaataccttcacattaaaactacacagaagcattctgagaaacttctttgtgatgtgtgcatttatctcacatagttgaacctatcttttgattgagcagttttgaaactctctttttgtagaatctgcaagtggatatatggagcccttttaggcctatggtggaaaaggaaatatcttcacataaaaactacacagaagcattctgagaaacttcattgtgatgtgtgcattcatatcacagagttgaacctttcctttgattgggcagttttttattttattattattgtgctttaagttttagggtaaatgtgcacagtgtgcaggttatttacatatgtatacatgtaactaacatatgtatacatatatacaacgctggtgtgttgctcccattaactcgtcatttagaattaggtatatctccaacagctatccctcccccctccctccaccccagaactgtccccagagtgtgatgttccctttcctgtgtccatgtcttttcattgttcaattccccccactgagtgagaacatgcgatgtttgggtttttgtccttctgatagtttactgagtatgatgatttcctatttcatccatgtccctagaaaggacatgaactcatcattttttatggctgcgtagtattccacggtatagatgtgccacattttcttaatccagtctatcactgttggacttttgggttggctacaagtctttgtgttttgaaacactctttttgaagaatctgcaagtggatatttggagagttttgaggcctattgtggaaaaggaaatatcttcatattaaaactacacagaagcattctgagaaacttctttgtgatgtgggcattcatccaatacagttgaacttttcttttgattgagcagttttgaaaaactttttttgtagaatctacaagtggatatttggagagctttgaggcctattgtggaaaaggaattatcttcacttaaaaactacacagaagcattctgagaaacttctttgcaatgttcacattcatctcacagagttgaactttcgatttgactgagcatttttgaaacactctttttgtagaaactgcaagtggatatttggaccgctttgaggcctattgaggaaaatgaaatatcttcacataaaaactacacagaagcattctgagaaacttatttgtgatgtgtgcattcaactcacagagttaaatttatcttttcattgagcagctttgaaactttctatttgtagcatctgcaagtggataattggagtgctttgaggcctattgtggaaaagaaaatatgttcatattaaagctacacagaagcattctgagaatcttctttgcgatgtgtgcattcatctcccagagttgaacttttcttttgattgagcagttttgaaacactctatttgtagaatctgcaagtggatatttggagtgctttgaggcctattatggaaaagtaaatatcttcacataaaaactacacagatgcattctgggaaatttctttgcgatttgtgcacccatctcacagacttgaaatttcttttgattgagcagtttggaaacactctttttgtagaatctgcaagtggatatttggagtgctttgaggcctattatggaaaagtaaatatcttcacataaaaactacacagatgcattctgggaaatttctttgtgatttgtgcacccatctcacagacttgaaatttcttttgattgagcagtttggaaacactctttttgtagaatctgcaattggatatttggagtgcttggaggcatttagtggaaaaagaaaaaacttcacataaaaactagatggaagcgttctcagaaactactttatgatgtgtgtgttcaactcacagagttgaacatttcttttgatggagcagcttggaaacactcttcttgtagtatctacaaaggatatttggagcacttggaggcctgcagctgaaaaggaaataatttcacataaacactagacagaagcattctgagaaacttctttgtgatgtgtgcatttatctcacagagttgaactgttcttttgcttgatcagttttgaaacactcttcctgtagtatctgcaagtggatattgggagcactttgtggcctattgtggaaaagaaaatatcttcacataaaaactacacagaagcactctgagaaacttcttgaacctatctattgattgagcagttttgaaattctctttttatagaatctgcatttggatgtttgaaggaccttgtggctattggtagaaaaggaaatatcttcacacaaaaactacacagaagcattcagagaaactattttgtgatgcgtgcattgatctcacagagtttaatctttcttttaattgagcggctttcaaaaactctttttgtagaatctgcaagtggatatttcgggcgctttcaggcctattgtggaaaaggaaatattttcacataaaaactacaccaaagcatccttagaaacttctttgggatgtttgcctttatgtcacagagttgaacctttcttttgattgagcagttttgaaacacactttttgtagaatcttcaaggagatagttggagcccttttcggccaatggtggaaaaggaaatatcttcatataaaaactacacagaagcattctgagaaactactttgaaacgagggcattcatctcaccgagttgaaaatttctttgggttgagcagttttgaacgactcattttgtagtatctgcaagggcatatttctagtattttttggcctattgtggaaaatgaaataccttcccataaaaacaacacagaagcattctgagaatttttttgtgatgtgtgcattcatctcacagagttgaaaatttctttgattgagcagttttaaaatactctttctatggaatctgcgagtggatatttggagcgctttaaagccttttgtgtaaaaggaaatatcttcacataaaaactacacagaagcattctgagaaacttctttgtgatgtgtgcattcatctcaccgagttgaacctttcttttcattgagcagtttggaaactctctttttgtagagtatgcaagtcgatttttggagcaatttgtggcgtatggtggaaaagaaaatatcttcacataatatatacatggaagcattctgagaaacttctttgtgatgtgtgcattcaactcaaagagttgaacctatgtttgagtagttttaaaactctctttttctagaatttgcaagtggatatttggagccatttgtggcctgtggtggaaaaggaaatatcttcacataaaaactacacagaagctttctgagaaacttccttgagatgtacgcattcatctcacagagttgaacatttcttttgattgagcagttttgaaacactctttttgtagaatctgcatgtcgatgtttggagtgccttgaggtctgttgtggaaaaggaagtatcttcatatcaaaactacacagaagcattctgagaaacttctttgtgatgcatgtattcttctcacaaggttgaacctctctcttgattgagcgattttgaaacactccttttgtagaatctgtaactggatatttggagtgctttgaggcctattaaggaaaaggaaatatcttcacataaaaactgcacagaaacattctgagaaacttctttgtgatgcgtgccttcatctcaaggagttgaacttttcttttgattgagcagtttggaaacacactttttgtataatctgcaagtgggtatttggaaaactttgaggcctattgtggaaaaggaaatatcttcacataaaaactacacagaagcattctgagtaacttctttgtgatgtgtgcattcaactcacagagttgaacctcccttttttggggggcagttgtgaaactctctttttgtagaatatgcaagtggatatttggagctctttgaggcctgttgtggaaaaggaaatatcttcacataaatactacgtggaagcattctgagaaacttctttgcaatgtgtgcattcatctcacagagttgaacggttattttgattgagcaatttggaaacacacattttgtggaatatgcaagtggatatttggagcgctttgaggtctgtggtgcaaaagggaatatcttcacataaaaactacagagaagcattcttagaaacttctttgtgatttgtgcattcatctcacagaggtgaacctttctttttattgagcagttttgaaactctctttttctaggatctgcaagtgcatatttggagtgctttgagctcttttttggaaaagggaatatcttcacataaaaactacacagaagcattctgagaaacttctttgtgatgtgttcattcatctcacagagttgaacctttattttgattgagcagtattgaaacaatctttttgtagaatctgaaagtgaatatttggaatgctttaaggcctaatgtggaaaaggaaatatcttcatataaaaagtgcacagaagcattctgagaaacttctctgtgacgcgtgcattcatctcaaagagttgaaactttctttttattgatcagtgttgaaacactgtttttgtagaatctgtaagtggatatttggagcgctttgaggcctaatgtggtaaagtaaatattttcacataaaagctacacagaagcattctgagaaacttctttgtgatgtgtgcattcatctcaaagagttgaagctttcttttgattgactagttttgaaacactctttttgtagaatctgcaagtggatatttggagcgcttttaggcctatcgtggtaaaggaaatatcttcacataaaaacaacacagaagcattctgagaaacttcttcatgatgtgtgcattcatcacatggaattaaacctttctgttgattgagcacatttgaaacacactttttgcagaatctgcaagtggatatttggaacgctttggcgcctcctgtggaaaaggaaatatcttcatataaaaagtacacagaagcattctgagaaactactttgtgatgcgtgccttcatctcacagagtggaacctttcttttgattgagcagttttgaaacactctttttgtagaatctgcaaatggataattagacctctttgaggccttttgtggaaaaatgaatatcttcacataaaaactacacagaagcattctgagaaacttctttatgatgtgtgcattcaattcacggagttgaacctatcttttgattgaggggttttgaaactctctttttgtagaatctgcaactggatatttagagccctttgaagccaatgatagaaaaggaaatatcttcatataaaaactacacagaggcattctgagaaacttcattgttatgtgtgcaatcatttcacagagtttaacgtttcctttgatagagcagttgtgaaacactctttttgtagcatctgcaagaggatatttggagcgctttgaggcctattgtggtaaaataattatcttcaaataaagctacacagaagtattctgagaaacttcttcgtgatttgtgcattcatctcacagagttgaacatttcttactattgagcagttttgaatcacactttttgcagaatctgcaagtgcatatttggagagctttggggcccatggtggaaaaggaaatatcttcatataaaaactacacagaagtattctgagaaacttctttgtgaagtgtgcattaatctcacagagttgaaccttacttttgattgagcagttgggaaacacactttttgtataatctgcaactggatatttggaacgctttgaggcctcttgcggaaaaggaaatatcttcatgtaaaaactacacagagcattctgagaaatttttttgcgaagtgtgcattcatttcacagagttgaaccttacatttgattgagcagtttggaaacactctttttttggaaactgcaagtggatatttgaagcgctttcacatccatggtgcaaaagggactatcttcacataaaaactacacagaatcattctgagaaacttctttgtgatgtgtgcattcaactcacagagttaaacttttcttttgattgagcagtttggaaacatcctttttgtagaatctgcatgtggatatttgggacgctatgaggcctactgtggaaaaggaaatatctttttgtaaaatctacagagaagcattctgagaaacttcttgtcatgcgtgcattcatctcacagatttgaagctttcttttgattgagcagtgtggaaaccctctttttgtagaatctgcaagtggatatttggagcgctttgaggtctattctggaaaaggaagtatcttcacataaaaactacacagaatcattctgagaaacttcttaaagatctgtgcattcatctcacagagttgaacatatcttttaattgtgcagttcaagaactctctttttgtagaatctgtaagtggatacttagagagctctgagtcttgtggtggaaaaggaaatatcttaacttaataatgacacaaaatcattttgagaaaattcttttgatgtgtgcattcaactcacagatttgagcctatcttttgattgagcacttctgaaactctctttttgtagaatctgaatgtggatatctggagccctatgcggtctgtggtagaaaaagaaacatcttcacataaaaactacacggacgaattctgaaaaacttctttgtgatgtgtgcattcatctcacagagttgaaccttccttttgattgaacagttttgaaacaatctttttgtagaatctgcaagtggatatttggaacgctttgaggccaattgtggaaaaggaaatatcttcatataaaaactgcacagaattattctgagaaactactttttgatgtgtgcattcaactcacatagttgaacctactttttgatttagcagttttgaaacactctttttgtagaatctgcaaatgtatatttagagtcatttgtggactatggtggaaaatgaaatatcttcacataaaaactacacagaagcattctgagaaacttctttgtgatgcttgcattcaacacacagagttgaaactttcttttgattgaggaattttgaaacactctttttgtagaatctgaaagtggatatttggagtgctttgtggcctaaggtggaaaaggaaatatcttcacataaaaactacaaagaatcattctgagaaacttctttgtgatgtgtgcattcatctcacagagttgaaacttccttttgattgagcagttttgaaactctgtttttgtggaatctgcaactggatatttggagccccttgcagcctatggtggagaaggaaatatcttcaaataaaaactacacagaagcattctgataaacttctttgtgatgtgtgcattcttctcacaggattgaacctctctcttgactgagcagttttgaaacactctatctggagaatctgcacgtggatattggaagcgctttgaggcatattgtggaaaatgtaatatcttcacataaaaactacacagaagcattgtgggaaacatctttgtgatgtgtgcattcatctcatagagtggaacctttcttttgattgagttgttttgaaacactctttttgtacagtctgcaagtggatatttggagggctctgaggcctgtcgtggaaaaggaaatgtcttcacagaaaaactgcacagaagcattctgagaaacttctacaccgtgagtgcattcatctcacagagttgaacttatcttttgatagagcagtttttatactctcttttggtagaatctgcaagtggataattggagcctttgtgggctacattggaaaaggaaatatcttccaatataaactacacagaaacattctgaaaaaattcttcgtgatgtgtgtattcatctcacagagttgaacctttctttgatttagaagttttgaaacactctttctttagaatctccaagtggatatttggagcgctttgcggcctattgtggaaaaggaaatatcttcccataaaaaatacacagaagcattctgaggaatatcattgtgatgtgggcattcatctcacagagttgagcgtttcgtttgattgagcaggtttgaaatactctttttgtagagtttgcaagtggatatttggagcactttgagggttacagtggaaaaggaaatatcttcaaataaaaactacacagaagcattctgaggaactaatttgtgatgtgcacattcaactcacagaatggaacctttctttggattgagcagctttggaacactctttttgtagaatctacaaaatggatatttggagcgctttaaggccttttgtcgaaaaggaaatatcttcacataaaacctgcacagaagtattctcagaaacttctttctgatgtgtgcattcatctcacagagttgaacctttcttttgattgagcagttttgaaacactctttttgtagaatctgcaagttttatttggagcactttgatgcctgtggtggaaaagggtatatcttcacataaaattacacagaagcgttctgagaaacttctttgtgatgtgtgcattcgactcacagagttgaacctatcttttgattgagcaggtttgaaactctctttttgtagaatctccaagtggatattttgagcctttgtggcctatggtggaaaaggaaatatcttccaataaaaactaaacagaagcattctgagaaacttgtttatgatgtgtgcattcacctcaccgacttgaatctttctttggattgagcagctttgaaaaactatttttgtagaatctgcaagtgaatatttgagcactttgattcctacggtggaaaatgaaacatcttcacatgaaaactagacagaagcattctgagaaacttctatgtgatgtgtgcattccactgacagagttgaaactatcttttgatagtgcagtattgaaactctccttttgtagaatctgcaagtggaaatttggtagacctttgcagccaatggtggaaaagagaatatcttcacagaaaaattacatagaagtattctgagaaacttctttgtgatgtgtgcaatcatctcacagagttgaacttttcttttgattgagcagttttgaaatattcgttttgtagaatctgcatgtgaatatttggagcgctttgaggcctatgttggaaaatgaaatatcttcataaaaaaattacatggagacattctaagaaacttctttgtgatgtgtgcattcaactgacagagctgaacttatcttttgatagagcagtttctaaactctttttatataatctgcaattggatatatggagcccttagaggcctgtggtggaaaagaaaatatcttcacataaaaactacacagaagaattctgagaaacttctttgtgatgttgcattcatgtcacagagttgaacctttcttttgattgagcagttagcaaacactctttttttagaatctgcaagtggctattttgagcgccttgaggcctattgtggaaaatgaaatatcttcacataaaaactacacagaagcattctgagaaacttctttgtgatgtgtgtattcacctcacagtgttgacactgtcttttgattaagcaagtttgaaatactcttttcgtagaatctgcaaatgaacgttttgagcgctttgaggcttatggtggaaaaggaaacatcttcacataaaaattacacaaaattcttctgagaaacttcattgtgatttgtgcattcaactcacagagttgaccttctcttgtgatagagcagttttcactctctttttctataatctgaaagtggatatttggagccctttgaggcctattgtggaatatgaaatatcttcatataaaaaccacacagaagcattctgagaaacatctttgtgatgtgtgcattcaactcagagagttgaacctttcttttgacagagcagttttgaaactctctttttgtagaatctgcaagtggttatttggagccatgtcctgccaatggtggaaaaggaaatatcttcccataaatactacacagaagcattctgagaaacttcattgtgatgcgtgcattcatcttaaagaattgaacctatcttttgatataacagttttgaaacactctttttgtagaatctgcaagtggataattggagccctttgaggtctatggtggaaaaggaaatatcttcccataaaaattacacagaagcattctgaggaacatctttgtgatgtgggcattcatctcacagagttgaaactttcttttgattgagcagttttgaaacattctttttgtagaatctgcaagtggatatttggagcactttgggtcctatggtggaaaaggaaatgtcttcatataaaaactgcacagaagcattctgacaaacacttttgtgatgtgtgtattcaattcgcagagttcaacctgtcttatgatagaacagttttgaaactctccttttgtagagtctgcaaccgtatatttggagccctttgtggacgatgttggaaaaggaaatatcttccataaaaattacacagcagcattctgaggaacttctttgtgatgtgtgcattcatctacgaaagttgaacctttcatttgattgagcagttttgaaacactctttttgtagatctgcaagtggatatttggagcgatttgaggcctgttgtgggaaaggaaatatcttcacataaaatctacactgaaacattcttacaaacatctttttgatgtgtccattcatcacacagagtttaacatttcttttgattgtacagtttggatatacactttttgtagaatctgcaactggatatttggagagctttgaggccttttgtcgaaaagaaaatatcttcacatgaaatctgcacagaagtattctcagaaacttctttctgatgtgtccattcatctcacagagttgaacttttcttttgattgaacagttttgaaacactctttttgtagaatctgcaagttttatttggagcactttgatacctacagtggaaaaggatatatcttcacattaaaaactacacagaagcattctgagaaacttctttgtggtgtgtgtattcatctcacagagttgaacctatcttttgattgagcagatttgaaactctctttttgtagaatctccaagtggatattttgagcctttgtggcctatggttgaaaaggtaatatcttccaataaaaactacaaagaagctttctgagaatcttgtttatgatatgtgcatttacctcacagatttgaacctttctttggattaagcagttttgaaaaactcttttgtagaatctgcaagtggatatttaagcactttgattcctatggtggaaaaggaaatatcttcacataaaaactagacagaagcattctgagaaacttctatgtactgtgtgcattccacacacagagtagaaactatcttttgatagtacattattgaaattctccttttgtagaatctgcaagtggatatttggagctctttgaggccaatgatggaaaaggatcttccaataaaaacaacaaagaagcattctgagacacttccttgtgaggtgtgcgttcatacccagagttgaacttttcctttaattgagcagtttggaacacctttttgtagaatctacaagtggatatttgtagcactttgagggctatgttggaaaagaaaatatcttcacataaaaactacacagaaaccttctgagaaacttctttgtgatgtgtgcattcatcacatggagttgaacctttcttttgattgaacagtttggaaacactcttttcatagaatctgcaagtggatatttggagtgctttgaggtgtattgtggaaaaggatatatcttcacataaaaactagacagaagcattctcagaaactgctttgtgatgtgtgcattcacctcacagactggaaccgttcttttgatagagcagttttgacacagtcttttagtagaatctggaagtgaatagttggatcccttgaaggcctattgtggaaaaggaaatatcttcaaatgaaaactacacagaagcattctgagaaaccactttgtgatgtgtgcaacaactcacagagttgaacctatcttttgatagagcagttttgaaactcactttttgtagaatccccaagtgtatatttggaaccctttgcgtcctatggtggaaaaggaaatatcttcccataaaaactacacagaagcattctcagaaacttctttgtgatgtgtgcattcaactcaaagagttgaaactatctttttatagagcagttttgaaactctctttttgaacaatctgcaagtggatatttggagtgctttgaggccttttgtggaaaaggaaatatcttcacataaaaactatacagaagcattttcagaaaattctttgtggtgtgagcattgatctcacagagttgaaccattttttgattgagcactttggaaacactcctatagtagaatctgcaagtggatatttgcagcccttggagggcaattgtggaaaaggaaatatcttcacataaaacctacacagaagcattctcagaaacttctttgtgatgtgtgcattaaactcacagtgttgaaccaatcttttgattgagcctatcttttgattgagcagttttgaaactcttttttgtataatctgcaagtggatatttggagccctttgtggcttatggtggaaaaggaaatatctgcaaatagaactacacagaagctttctgagaattttttttgtgatgtgtgcattcatcttacagagttgaaactttcttttcattgagcagttttgaaacactcttttcataaaatctgcaagtggatatttggagtccttggaggcctattgcggaaaaggaaatatcttcacataaaagctacacagaagcagtctgagaaattactttttgatgtgtgcattcatctcacagagttgaaccttccttggattgagcagttttgaaacactctttctgtagaatatgcaagtggatatttggagtgcttttaggcctattgtggtaaaggaaatatcttcaaataaaaactacacagaagcattctgagaaacttctttgtgatgtgtgcattcaactcacagagttgaacctatcttttgatagagcagttatgaaactcgcttttgtagaatctgcaagtcgatatttgtagccctttgcagtttattgtggaaaaggaaatattttcacataaacactacacagaagccttctgagaaacttctttgtgatgtgcattcatttcacagcgttgaacctctcttttgattgagcagtttggaaacacttttttggagaatctgcaagtggatatttgtagcgctttgaggagtattgtggaaaaggaaatatcttcacataaaaactacaaagaagcattctgagaaagttctttgtgatgtgtgcattcacctcacagagctgaacttttcttttgcttgagcagtttggaaacactcttttagtagaatcgggaagtggatagatttagctctaggaggcctattgtggaaacggaaatatctgcacatgaaaactacacagaagcattctgagaaaccactttgtgttgtgtgcaatcaagtcacacagttgaacctatcttttgatagagcagttttgaaactctctttttgtagaatctccaagtggatactggaacccttagcatcctatggaggaaaaggaaatatcttcacataaaaacttcacagaagcattctgagaaacttctttgtgatgtgtgcattcaactcacagagttgaagctatcttttgatagagcagttttgaaactctctttttgcagaatctgcaagtggatatttggagcccttggtggcctatggtggaaaagcaaatatcttcacctaaaaactacacagaaggattctgagtatctactttgtgatgtgggcattcatctcacagtgttgaaactctcctttgattgagcagtttggaaaaactctttttgtagaatctgcaagtggatattaggagcgctttgaggcctattgtggaaagggaaatatcttcacataaaaaatacacagaagcattattagcaacttctttgtgatgtgcgcattcatctcacagaattgatccttttttgatcgagaagtttggaaacactcctatagtagaatctgcaagtggatatttggagcccttggaggcctattgtggaaaaggaaatatcatcacataaaacctacgcagaagcattatgagaaacttctttgtgaattgtgcatccatctcacaccgttgaaactttcttttgatagagcagttttgaaacactattttcataggatctgcaagtggatattttgagcacttttgggcctatggtggaaaaggaaatatcttcacataagaacaacacagaagcattctgataaacttctttgtgattcgtgcattcatctcaccggtttgaacctatattttgattgtacagttttgaaacactcttattatagactctgcaagtggatatttgaagcactttgaggcctgttgtggaaaacgaaataacttctaataaaaactacacagaagcattctgagaaacttctttgtgatgtatgcattcaacttacagagttgaacctatcatttgattgaagacttctgaatctctctttttgtaaaatctgcaaatggatatttggagccctttgcagcctattttggaaaaggaaatatcttcacataaaaactacacagaagcattatgagaaacttctttgtgacgtgtgcattcatctcacagaggtgaacctttctttggattgagcagttttgaaacactttttttatagaatttgcaagtggataattgaagcactttgaggcctattgtggaaaggaaatatcttcacttaaaaattgcacagaagcattctgagaaacttctttgtgatgtgtgcattcatctcacagagttgaacctttcttttcattgagcagtatggaaacaatcattttgtagaatctgcaagtggatatttggagcgctttgagacctattgtggaaaatgaagtttcttcacaaaaaattacacagaagcattgtgaaaaactactttgtgatgtgtgcattcatctcacagagctgaacctatcttttgatagagcagttttgaaactctactttgtagaatctgcaagtggatatttgtagccctttgtggcctatgttggaaaaggaaatgtattcacataaaaactacaccaaagcattctgagaaacttcttttgtgctatgtggattcatctcacagagttcagcctttcctttgattgagcagttttgaaacacactttttgtagaatatccaggtggatatctggagcactttctggccttttgtggaaaaggaaatatcttcacataaaaactacatagaagcattattggaaacttctttgtgatgtgtgcattcatctcactgtgttgaacctttcttttgattgagcaattttgaaacactgtttttgtagaatctgcaagtggttatttagagagcttggaggcctattgtggaaaaggaaatatcttcacataaaaactgcacagaagcattctgagaaacttctttctgacgtgtgcattcaagtcacaatgttgaacctatcttctcatggagcagttttgaaactctctttttgtagaatcttcaagttgttttttggagccctttgcagcttatggtggcaaaggaaatatctccatataaaaactacacagaagcattctgagaaacttctttgtgatgtgtgcattcatttcacagagttgaacgttttttgattcagcagttttgaaacactcattttttagaatatgcaagtggatatatggagcgttttgaggccttttgtggaaagggaagtatcttcacaaaaaaactacgcagaggcattctgagaaatatcttgtgaagtgtgcattcatctcatagagttgaactttgttttcatcgagcagttttgaaacactctttttgtagaatctgcaagtggatatttgtagcattttgaggcctattgttgaaaatgaaatatcttcacataaaaactacacggtgtaaggaattgatccagtttcagctttctacatatggctagcaagtattcccagcaccatttattaaatagggaatcctttccccatttcttgtttttcttaggtttgtcaatgatcagatagttgtatgaatgtaacattatttctgagggctctgttctgttccattgatctatatctctgttttggtaccagtatcatgctgctttgtagtatagtatgtagccttgtagtatagtttgacgtcaggtagcgtgatggctccagctttgttgttttggcttaggattgatttggtgatgcgggctcttttttgattccatatgaactttaaagtagttttttccaattctgtgatgtaagtcattggtagcttgatgaggatggcattgaatcaataaattaccttgggcaatatggccattttcatgatattgattcttcctacccatgagcatggaatgttcttcgatttggttgtatcctcttttatttcattgagcagtgttttgtagtactccttgaagaggtccttcatgtcccttataagttggattcctaagtattctattctctttgaagcaattgtgaatgggagttcactcatgatttggttctctgtctgtctgtcactggtgtataagaatgcttgtgatttttgtacattgattttgtatcctgagacctagctgaaattgcttatcagcttaaggagatttccggctgagacaatggggttttctagatatacaatcatgtcatctgcaaacagggacaatttgacttcctcttttcctaattgaatacactttatttccttctcctgcctaattgccctggccagaacttccaatactatgttgaataggagtggtgagagagggcatccctgtcttgtgccaattttcaaagggaatgcttctagtttttgcccattcagtatgatattggctgtgggtttgtcatagatagcttttattattttgagatacgtcccatcaatacctaatttattgagagtttttagcatgcagagttgttgaattttgtcaaaggccttttctgcatctattgagataatcatgtggttttcatctttggttctgtttacatgctggattgcatttattgatttgcatatattgaaccagccttgcatcccagggatgaagtccacttgatcatggtggataagccttttgatgtgctgctggattgggtttgccagaattttatagaggatttttgcatcaatgttcatcaaggatatttgtctaaaattatcttttttgattgtatctctgcccagctttggtatcaggatgatgctggcctcataaaatgagttagggaggattccctcttttgctattgattggaatagtttcagaaggaatgataccagttcctccttgtacctctggtagaattcagctgtgaatccatctggtcttgggctctttttggttggtaagctatttattattgcacaatttcagatcctgttattggtatattcagagagtcaacttcttcctggtttagtcttgggacagtgtatgtgtcaaggaatttattcatttcttctagattttctagtttaattctgtagaagtgtttgtagtattctctgatggtagtttgtatttctgtgggattggtgattaaagacttaagtattagacctagaaccataaaaaccctagaagaaaacctagacattacaattcatgacataggcatgggcaaggacttcatgtctaaaacaccaaaagcaatggcaacaaaatccaaaagtaacaaatgggatctaattaaactaaagagcttctgagcaacaaaagagactaccatcagagtgaacaggcaacctaaagaatgggagaaaatttttgtaacctacttatctgacaaagggctgatatccagaatctacaatgaactcaaacaaatttacaagaaaaaaacaaacaaccccatcaaaattgggtgaaggacatgaacagacacttctcaaaagaagacatttatgcagccaacaaacacatgaagaaatcctcaccatcactggccatcagagaaatgcaaatcaaaaacagaatgagataccatctcacaccagttagaatggcaatcattaaaatgtcaggaaacaagaggtgctggagcggatgtggacaaataggaacacttttacactgttggtgggtctgtaaactagttcaacctttgtggaagtcagtgtgggattcttcagggatctagaaccagaaataccatttgacacagccatcccattactgggtatatacccaaaggactataaaccatgctgctatgaagacacatgcacaagtatgtttattgcaggactattcacaatagcaaagacttggaaccaacacaaatgtccaaaaatgatagactggattaagaaaatgtggcaaatatacacaatggaatactatgcagccataaaaaatgatgagttcatgtcctttgtagggacatggatgaaattgggaatcatcattctcagtaaactatcacaagtacaaaaaacagaacaccgcatattctcactcataggtgtgaattgaataatgagaacacatggacacaggaaggggaacatcacactcaggactgttgtggagtcaggggttgggggagggatagctttaggagatatagctaatgctaaatgacgagttaatgggtgcaacacaccagcatggcactggtatacatatgtaactaacctgcacatggtgcacaggtactctaaaacttaaagtataataacaattaaaaaaacacacaaaaagagattctcacacacacaaacacacacacaaatacatggaagctttctgagaaacttctttgtgatgtgtgcattcatctgacagagttgaacctttcttttgattcagcactttggaaacactctttttgtagaatctgcaagtggatatttggagtgatatgaggcctatggtggaaaaggaaatgtcttcacataaaaactacacagaagcattctgagaagctactttgtgatgtgtgcattcatctcacagacctaaagctttcttttgattgagcattttgaaacattctgttgggagaatctgcaagtggatatttggagcgctttgaggattattgtggaaaaggaaatatcttcacataaaaattacacagaggcattctgagaagcttttttgtgatgtgtgcattcatctcacagagttgaaattttcttttgattgagcagttttgaaacattctctttgtagaatctgaaagtggatatttggagtgctttgaggcctattgtggaaaaggaaatatattcacataaaaactacaaggaaacattctgagaaacttctttttgttgtgtgcattcatctcacagatttgaacttttcttttgcttgagcagtttggaaacactctttttgtagaatctgcaaggggatatttggagcactttgaggcctattgagaaaaaggaaatatcttcacaaaaaaccacacagaagcattctgagaaacttctttgtgatgtgtgcattcaactcacagtgttgaacctatcttttcaatgagcacttttgaaactcccttttttagaatccagaagtggatatttggagccttttgtggcctatgttggaaaaggaaatatcttcacatgaaaactacacagaagcattctgagaaacttctttgtgatgtgtgcattcacctcacagggttgaacctatattatgattaagcagtttggaaacactctttttgtagaatctgcaagtggatatttggagcgctttgatgcctacggtggaaaaggaaatgtcttcacataaaaactacacagaagcattctgagaagctactttgtgatgtgtgcattcatctcacagagctaaacctttcttttgattgagcagttttgacacactctgtttgtagaatctgcaagtgtatatttggagcactttgaggcctattgtggaaaaggaaatatcttcacataaaagctacaaagaggcattctgagaagcttttttctgacgtgtgcattcatctcacagagtcgaaactttcttttgattgagcagtttggaaacattctgtttgtagaatctgaaagtggatatttggggcgctttgaggcctattgtggaaaaggaaatatattcaagtgaaaactacacagaagcattctgagaaacttctttttgttgtgtgcattcatttcacagagttgaacctttcttttgcttgagcagtttggaaaaactctttttgtagaatctgcaagaggatatttggagcactttgaggcctattgtgaaaaaggaaatatcttctaaaaaaactatacagaagcattccgagaaacttctttgtgatgtgtgcattcaaatcagagtgttgaacctatcttttgaatgaacacttttgaaactcccttttgttgaatctacaagtggatatttggaaccctttgtggcctatgttggaaaaggaaatatcttcacataaaaacaacaaagaagcatttggagaaacttctttaagatgtgttcatctcacagatttgaaacattctttttattgagcagttttgaaacactcttcttacagtatctgcaagtggatatttggagccccttgagacctattgtggaaacggaaatatcttcacataagaactacacagaagcatcctgagaaacttctttgtgatgtgtgcatttatctcacagagttgaacctgtcttttcattgagcagttttggaacactctatttgtagaatctgcaagtgcatattaggagtgctttgaggcttattgtggaaaaggaaataccttcacataaaaactacacagaaacatcctcagaaacttctttagatgtgtgcattcatctcacagagttgaacctttcttttcgttgagcagtttggaaaaactcttttagtagaatctgcaaatggatatttagagcccttggaagcctattgtggaaaaggaaatatcttcacataaaaagtccacagaagcattctgagaaacttctttgtgacgtgtgcattcatctcacaaagttgaacgtttttttttttttttattgagcagcttggaaacactctttttgtgggatctccatgtggatatttggagcactttgaggcctatggtggaaaaggaaatatcttcgcatgaaaactacacagaagcattctgagaaacttctttgtgatgtctgcattcatctcacagagttgaatctttcttttgatggagcagttttgaaacactctttttgtagaatctgcaagtggatatttggagcgctttgaggcctaatgtgaagaaggaaatatcttcacataaaaactgcacagaagcattctgagaaacttctttatgatgtgtgcattcagctcacagagttgaacctatctttttaaagagcagttttgaaactctcctttcgtgtaatcttcaagtggatatttgaagccctttgcagcctatggtggaaaaggaaatatcttcacataaaaactacccagaagcattctgagaaacttctttctgatgtgtgcattccactcacagagttgaacctatcttttgattgagcagttttaaaactctctttttgtagtatctgcaagtggatatttggagtgctttgaggcttatggtggaaaacgaaatatcttcacataaaaacaacacagaagcattctcagaatctcctttgcgatgggtgcattttcgtcacagagttgaacttttcttttgactgagaagtttggaaacactctttttgtagaatatgaaagtggatttttggagtgctttaaggcctatggtggaaaaggaaacatcttcacataaaaactacacagaagcattctgagaaacttatttgtgatgtgtgcattcatttcacagtgataaacctttcttttgattaagcagttttgaaacactctttttgtagtttctgcaagtggatatatggagagatttgaggcctgttgtggaaaaggaaatatcttcacataataaccagacagaagcattctgagaaacttctttgtgatgtgtgtattcacctcacagaatagaacattgcttttgattaagcagttttgaaaccctctttttgtacaatctgcaagtggatgcaatggcatccgcgattgcccaggcttgcttaagtaaataaagcagccggggagctagaactgggtgggcccaccatagctcaagaaggcctgcctgcctctgtaggctccacttctgggggcagggcacagacaaaccaaaagacagcagtaacctctgcagacttaaatgtccctgtctgacagctttgaagagagcatcggttctcccagcacacagctggatttctcagaatgggcagactgcctcctcaagtaggtccctgactcttgactcctgagcaccctaactgggaggcacccccaagcaggggcagactgacaccttacacggctgggtactcttctgagacaaaatttccagatgaacaatcagagagcagcatttgcggttcacgaaaatccgcttttctgcagccactgctggccaatgctgctgttacccagaaaaatagggtctggagtggacctccagcaaacttcaacacacctgcagctgagggtcctgtctgttagaaggaaaactaacaaacagaaaggacatccacaccaaaaacccatttgtacatcaacaacatcaaagacaaaagtagataaaaccacaaagatggggaaaaaacagagcagaaaaactggaaactctaaaaaccagagcacctctcctcctccaaaagaatgcagttcctcaccagcaacggaacaaagctggatggagaatgactttgacaacttgagagaagaaggttcggatgacgaaactactccgagctacagcaggaaattcaaaccaaaggcaaagaagttaaaaacattgaaaaaaatttagacgaatgtataactagaataaccaatatagagaaatgcttaaaggagctgatggagctgaaagccaaggctcgagaactacatgaaaaatgcagaaacctcaggagccgatgcaatcaactggaagaaagggtatcagtgatggaagatgaaatgaatgaaatgaaagcgagaagggaagtttagagaaataaaaagaaatgagcaaagcctccaagaaatatgggactatgtgaaaagaccaaatctacgtctgattggtgcacctgaaagtgatggggagaatggaatcaagttggaaaacactctgcaagatattatccaggacaacatccccaatctaacaaggcaggccaacattcagattcaggaaatacagagaacgccacaaagatactcctcgagaagaacaactccaagacgcataattgtcagattcagcaaagttgaaatgaaggaaaaaatgttaagggcagccagagagaaaggtagggttacccataaagggaagcacatcagactaacagtggatctctcagcagaaactctagaagccagaagagagtgagggtcaatattcaacattcttaaagaaaagaattttcaacccagaatttcatatccagccaaactaagcttcataagtgaaggagaaataaaatactttacagacaagcaaatgcagagagattttgtcaccaccaggcctgccctaaaagagctcttgaaggaagcactaaacatggaaaggaacaaccggttccagccactgcaaaatcattccaaattataaagaccttcgaggctaagaagaaactccattaactagtgagcaaaatatccagctaacatcataatgacaggatcaaattcacacataacaatattaactttaaatgtaaatggactaaatgccccaattaaaagacacagactggcaaattggataaggagtcaggacccatcagtgtgctgtattcaggaaacccatctcacgtgcagagacacacataggctcaaaataaaaggaaagaggaagatttaccaagcaaatggaaaacaaaaaaaggcagaggttgctatcctagtctctgataaaacagacttaaaccaacaaagatcaaaagagacaaagaaggccattaaataatggtaaagggatcaattcaacaagaagagctaactatcctaaatatatctgcacccaatacaggagcacccagattcataaagcaagtcctcagtgacctacaaagagacttagactcccacacaataataatgggagactttaacaccccactgtcaccattagacagatcaacgagacagaaagttaacaaggatacccaggaattgaactcagctatacactaagaggacctaagagacatctacagaactctccaccccaaatcaacagaatatacatttttttcagcaccacagcacacctattccaaaattgaccacgtagttggaaagaaagctctcctcaacaaatgtaaaaatcagaaattataacagactgtctctcagactgcaatgcaatcaaactagaactcaagattaagaaactcactcaaaaccgctcaactacatggaaactgaacaacctgctgctgaatgactactgggtacataacgaaatgaaggcagaaataaagatgttctttgaaaccaacgagaacaaagacacaacataccagaatctctgggacacattcaaaacagtgcgtagagggaaatttatagctctaaatgcccacaagagaaagcaggaaatatccaaaattgacaccctaagatcacaattaatagaactagaaaagcaagagaaaacacattcaaaagctagcagaagataagaaatagctaaaatcagagaacaactgaaagaaatagtgacataaaaaaccttcaaaaaattaatgaatccaggagctagttttttgaaaggatcaacaaattgatagactgctagcaagactaatgcagaaaaaaagagagaagaatcagatagatgcaataaaaaatgataaaggggatatgaccaccaatcccacagaaatataaactgccatcagagaatactacaaacacctctatgcaaataaactagaaaatctagaagaaatggataaattcctcaacacatacaccctcccaagagtaaaccaggaagaagttgaatctctgaatagaccaataagaggatctgaaattgtggcaataatcaatagcttaccaactaaacagggtccaggaccagacggattcacagccaaattctaccagaggtacaaggaggaactggtaccattccttctgaaactattccaatcaatagaaaaagagggaatcctgcctaactcattttatgaggccagcatcatcctgataccaaagccaggcagagacacaaccaaaaaggtgaattatagaccaatacccgtgatgaacattgatgcaaaaatcctctataaaatactggcaaaccgaatccagcagcacatcaaaaagcttatccaccatgatcaagtgggcttcatccctgggatgtaaggctggttcaatattcagaaatcaataaatgttatccagcatataaaccgaatcaaagacaaaaaccacatgattatctcaatagatgcagaaaaggcctttgacaaaattcaacaactctgcatgctaaaaactctcaataaattagatattgttgggacgtatctcaaaataataagagctatctatgacaaacccacagccaatatcatactgaatgggcaaaaactggaagcattccctttgaaaactggcacaagacagggatgccctctctcaccactcctattcaacatagtgttggaagttctggccagggcaattaggcaggagaaggaaataaagtgtattcaattaggaaaagaggaagtcaaattgtccctgtttgcagatgacatgattgtatatctagaaaatcccattgtctcagcccaaaatctccttaatctgataagcaatttcagctaagtctcaggatacaaaatcaatgtacaaaaatcacaagcactcttatacactagtgacagacaaacagagaaccaaatcatgagtgaactcccactcacaattgtttcaaagagaatgtgtttgctcttgcttttctaattcttttaattgtgatgttagggtgtcaattttggatctttcctgctttctcttgtgggcatttagtgctataaatttccctctacacactgctttgaatgtgtcccagagattctagtatgttgtggatacaaaattaatgtacaaaaatcacaagcattcttatacaccaataacagacaaacagagatccacatcatgagtgaactctcattctcaattgcttcaaagagaatgaaatacctaggaatccaacttacaagggatgtgaaggacatcttcaaggagaactgcaaactactgctcaatgaaataaaagaggatacaaagaaatggaagaacattccatgctcatgggtaggaagaagcaatatcgtgaaaatggccatactgcccaaggtaatttatcgattcaatgacatccccattaagctgccaatgactttcatcacagaattggaaaaaagtactttaaagttcatatggaaccaataaagagcctgcattgccaagtcaatcctaagccaaaagaataaacctggaagaatcacgctacctgacttcaaactatactacaaggctactgtaaccaaaactgcatggtactggtaacaaaccagagatatagctcaatggaacagaacagagccctcagaaataatgccgcatatctaaaacaatctgatatttgacaaacctgagaaaaaccagcaatggggaaattatttcctatttaataaatggtgctgggaaaactggctagccacatgtagaaaactgaaactggattccttccttacaccttatacaaaaatcaattcaagatggattaaagacttaaacgttagacctaaaaccataaaaaccctggaagaaaacctaggaattgccattcaggacataggcatgggcaaggacttcatgtctaaaacacgaaaagcaatggaaacaaaagccgaaattgacaaatggaacctaattaaattaaagagcttctgcacagcaaaagaacctaccatcagagtgaacaagcaacctacaaaatgggagaaaattttcgcaacctactcatcggacaaagggctaatatccagaatctacaatgaactcaaacaaatttacaggaaaaaaacaaacaaccccatcaaaaagtgagtgaaggacatgaacagacacttctcaaaagaagacatttatgcagccaagaaacacatgaaaaaatgctcaccatcactggccatcagagaaatgcaaatcaaaaccacaatgagataccatctcacaccagttagaatggcaatcattaaaaagtcaggaaacaacaggtgctggagaggatgtggagaaacaggaacacttttacactgttggtgggacagtaaactagctcaacccttgtggaaatcagggtggcaattccttaaggatctagaactagaaataccacttgacccagccatcccattattgggcatatacccaaaggattataaatcatgctgctataaaaacacatgcacacataagtttattgcagcactattcacaatagcaaagacttggaaccaacccaaatgtccaacaatgatagactggattaataaaatgtggcccatatacaccatggaatactatacagccataaaaaaggatgagctcatgtcctttgaagagacatggatgaatttggaaatcatcattctcagtaaacaattgcaaggacaaaatccaaacaccacatgttctcactcacaggtgggaattgaacaatgagaacacatggacacaggaaggggaacatcacactctggggactgttatggggtgggggaaggggggcgatagcattaggtgatatacctaatgctaaatgacgaattaatgggtgcagcacaccagcatggaacatatatacatatgtaactaacatgcacattgtgcacaagtaccctaaaacgtaaagtaaaataaaataaaaaataaaaaagaatgcttacaaactgctcaatccaaagtaagcttccactccttgagttgtatgcacacatcacaaaggagtttctcagaacgcttcttgctagtttttaggtgaggatatttccttttatactgtaggtttcaaagctctccaaatatccatttgcagattctacataaagaatgtttccatactgctcaagcaaaagaaaggttccactctgtgagttgaatgcacacatcacaaagaagtttctgagaatgattcagtctagtttttaggtgaagatatttccttttacatcataggcctcaaagcgcttgaaatatccacttgcagattctacaaaaagagtgtttcaaaacttcccaacgaaaagagttgctcaactgtgtgagatgaatgcacacatcaaaaaggagtttctcagaatgcttctgtcttgtttttatgtgaagatatttactttttcaccataggcatcaaatcgctccaaatatccacttgcagattctacagaaagagtgtttcaaaactgctcaatcaaaagaaaggttcaactctgtgagatgaatgcacgcatcacaaagaagtttctcagaatacctctgtctagtttttatgtgaagatatttccttttccaatataggccacaaagcgctccaaatatccacttgcagattctacaaaaagtgtgtttctcagaatgcttctgtctagttcttatatgaagataactccttttcctctatagaccaaaaagcactcaaaatatccttttggagatagtacaaaaagcctgtttccaaactgctcaatcaaaagaaagttttaactctgtgagttgaaagcatacatcacaaagaagtttcccagaatgcttctgctagtttttatgtgaagatatttcctttcccaatataggcctcaaacgctccaaatatctacttgaagatactagtaaaagagtgtttcaaaactgctcaatcaaaacaaaggttcaactctgtgagatgaatgcacacatcacaaagaagtttcttgcaatgcttctgtgtagtttttatgtgaatatatttcctattccacctgtggcctcatagtgctccaaatatccttttgcagataatacagaaagactctttccaaactactcaatcagagaaaagtttcaagtctgtgagttgaatgcgcacatcacaaagaagtttctcagaatgcttctgtctagtttttatgtgaagatatttccttttccaccagagccctcaaagggctccaaatatccacttgcagaatctacaaaatctgtggttcaaaactgctcaatcaaaagaaagtttcaactctgggagatgaatgtgcacatcacaaagatgtttcccagaatgcttctgtctagtttgtatgtgaagatattttcttttccactacaggctgcaaagctctccaaatatcccgttgaagattctaaaaaaagagtttttcaaaactgctaaatcaaaaaaatttcaaatctgtgagatgaatgcacacatcccaaattgtttctcagaatgcttctgtttagtttttacgtgaatatatttccttttccactacaggcctcaaataatttgaaatatccatttgcagatactacaaaaagactgttcccaaactgcttaatgaaaacaaatgttcaactgtgtgcgttgaatgcacacatcacaaagaagtttctcagaatgcttctgtcttgtttttatatgaagatttttccttttccatcataggcctcaattcgatctgaatatccatctgcacattctacaaaaacagtgtttcaaaactgctctatcaaaagaaaagttcaactctgtcaaatgaatgtacacatcaaaacgtagtttttctgaatgcttctgtctagtttttatgtgaagttatttccttttccaccataggccacaaagggctccaagtaaaaaattgcagattctataaaacgagtgtttgaaaactgctcaatcaaaagacaggttcaactctgtgtgatgaatgcacatatcacaaagtagtttcttacaatgcttctgtctagtatttatgcgaagatttttccttttccaccatatgcctcaaatcgctcctaatatccacttgcagattctacaaaaagagtgtttcaatagtgctcaatcaacagaatggttcagctctgggagatgaatgcacacatcccatagtagtttctcagaatgcttttgtctcgtttttatgtgaagatattcccgtttacactatagggctcaaaccgctccaaatatccatttgaagattctacaaaaagtgtttctgaaaactgctcaataaaaaaaagcttcaactctttgaaatgaatgcacacatcccaaataatttccaagaatgcatgtgtctagtttttatgttaagatatttccttttccaccataggcctcttagtgctccaattatccatttgcagatactgcaaaaagactgtttccaaactgctcaaaaaatgaaaagtacaactctgtgagttgaatacacacatcacaaagaagtttctcagaatgtttctgtctagtttttatgtgaagatatttccttttccaccatagtcctcatagtgctccaaatatccacttgcagattctacaaaaggagtgtttcaatactgctcaatcaaaagaaaggttcaactctgtgagatgaatgcacacatcaaaagaagttactcagaattcttctgactagattttatgtcaagatatttccttttccactataggcttcaaagcgcttcaaatatacatttgcagataatataaacagaatgtttccaaactgctgaatcaaaagaaaggtacaactcagtgagttgaatgcaaacatcacaaacaattttctcagaatgcttctgtctattttatatctgaagatatttccttttccattataggcctcaatacgctccaaatatccattcaaagatactacaaaaagactgtttccaacttgctcaatcaaaaaaacattgaactctgtgatttgaatgcacacatcacaaagtagtttctcaaaatgcttctgtctagtttttaggtgaagatgtttccttttccaccataggcctcaaatcactccaaatatcctcttgcagattccacaaaaagagtgtttgaaaaactgctcaatctaaagaaaggttcacctctttgagatgaatgtacacaacacaaagaagtttctcagaaagcatctgtgtagttttatgtgaagatatttccctttccactataggtctcaatgcgctccaaatgtccacttgcagatactacaaaaagtctgtttccaaactgcacaatcaaaagaaaagttcaactctgtgagttgaatgcccacatcacaaaaaagtttctcaggattgtgaagtctagtttttatgtgaagatattcctttttctactataagtcacagaacactccaaatagccacttgcagatcctacaaaaatagtgtatcaaaactgctcaatcaaaggaaagtatcaactctctaagatgaatgcacacataacaaagaagtttctcagaatgcttctgtttagtttttacgtgaagatttttccttttccacgataggcctcaaagcgctccaaatacccattttcagattctgctaaaataatctttcaaaactgctcaaggaaaagaaagtttcaaccctgtgagatgaatgcaaacgtcacaaagaagtttctcagaatgctactatctagtttctatatgaagatatttccttttccaccattggtctcaaagctctccaaatatccacttgcagattctacaaaaatagtgtttccaaactcctcaatgaaaagaaagtttcaagtctgtgggatgaatgcacacatcacaaagaagtttaacagaatgcttccatctagtttttatgtgaagacatttcattttccactgtaggcctcgatgtgctccaaatattcatttgtagatgctacaaaaagactggtaccaaactgttcaatcaaaagaaaagttgaactctctgagttgaatgcactcatctcaaggaattttctaagaatgcttgtgtctagtttttatgtgaagatatttcattttccactataggccacaaagtgctccaagtatccacttgcagattatacaaaaagagtgtttcaaaactgctcaaacaaaggaaatgttcacatctgtgagataaatggacacataacaaagaagttcttcagaatgattgtgtctattttttatttgaagatatttccttttccattataggctgcaaaacactccaaatatccatttgcagttaatataaaaagactgtttccatactgctgaatcaaaagaaatattcaactctctgagttgaatccaaacatcacaaagaattttctcagaatgtttctgtctagtttttatgtgaagatacttccttatcccctataggtctcattgcactccaaatatccatttgaagatagtataaaaaagacggtttccaaactgctcaatcaaaagaaaggttcacctctgttagttgaatgcacacatgggaaaaaagtttctaagaatgcttctgtgtagcttttatgtgaagatatttcctttccaccataggtctcaaagcgctccaaatatccacttgcaaattctacaaaaataatgtttcaaaactcctcaatcaaaagataggttcaactctgtgagttgaattcacacatcataaagaaatttctcacaatgcttccgtctagtttttatgtgaagatattttccaccacaggccgcaaatcactccaaacatctgcttgcagattcgacaaaaagagtgtttcaaaactgttcaatcaaaagaaagtttcaactttgtgaggtgaatgcacacatcaaaactaagtttctcagaatgtttctgtctagtttttatgtgaagagaattccttttccagtataagccacaatgcgattcaaatatccacctgcagatcctacaaaaagagtgttacagaactgctcaatcaaaagaaaaattcaaccctgtggagatgaattcacacatcacaaagatgtttctcagaatgcttctgtatagttgttaagtgaagagacttccttttccaccacaggcctcaaagcagtccaaaatccttttgcatgtagtaaaaaaagatggtttccaaacttcacaatcaaaagaaaggttcaactctgtgagatgaatgcacacttcacaaagaagtttctcagaatgcttctgtctagtttttatgtgaagatatttccttttccacaataggcctcaaagtgctccaaatatactcttgcagatactacaaaaatacggtttccaaactgctcaataaaggaaaggtacaactctgtgagtgcaatgcacacatcacaaagaagtatctcagaatgcttctgtctattttctatgtgtagatatttccttttctaccataggccacaaagcactccaaatatccacttgcagattttacagaaacattgtttcaaaactgctcaatctaaagaaaggttcaactgtgtgagacaaatgcacacatcacaaagaagtttctcaaaatgcttctgtctagtttttatgtgaagatattaccttttcccctatagcccgcaaagcactccatatatccacttgcagattctacagacagagtgtctcaatactgctcaatgcaaaaaaatttcaactccgtgagatgaatgcacacatcacaaagaagtttctcagaatgcttctgtctagtttttatgtgacgatatttccttttccaccagaggcctcaaaaccctccaaatatactcttgcagacactacaaaaatacggtttccaaactgtttaatcaaaagaaattttcaactctgtgagtgcagtgcacacatcacaaagaagtatctcagaatgcttctatctattttctatgtgtagatatttccttttccaccgtaggcctcaaagcacttgaagtatccacttgcagattctacaaaaagagtgtttcaaaactgctcaatcaaaagaaaggttcaactctgtcagttgaatgcacacatcacaaagaagtttctcagaatgcttctgtctggttttgatgtgaggatattaccttttccactataggccacaaagcgctccgaatatccagtttcagaatctacaaaggagtgtttcaaaactgctcaatcaaaagaaagtttcaactctgtgagatgaatacacacatcacaaagaagtttctcagaatgcttctgtgtagtttttatgtgaagatatttccttttccactatagtctccaaagcgctccaaatatccatttgcagatacaagagaaagactatttccaaactgctcaatcaaaacaaatgttaaactctgtgagttgaatgcacacatcacaaagaagtttctcagaatgcttctgtctagtttttatgtgaagatatttccttttccacaataggactcaaagggctccaaatatccacttgcagattcttcaaacagagtgtttcaaaactgctcaatcaaaaggaaatttcaactctgttagatgaatgcacacaaaagaaagaagtttctgagaatacttctgtctagtttttatgtgaagatatttccttttccaccataagccccaaagcactccaaatatccacatgcagattctacataaagaatgtttcaaaactgctcaataaaaggaaaggtttagctatgggagatgaatgcacacatcacaaagaagtttctcggaatgcttctgtctagttttcatgtgaagagatttccttttccactaaaagacgcaaagctctccaaatatccacttgcagattctacagaaagagtgtttcaaaacggctcatcaaaagaaagtttcaattctatgagatgaatgcccacatcacaacgtagtttctcataatgtctctgtctagtttttatgtgaagatatttccttttccatcatagtccccaaagccctccaaatatccatttgcagatacttcaaaaacattctttccaaactgcttaatgaaaagtaaggttcaaatctgtgagatgaatgcacatatcacaaagaagtttctcagaatgcttctgtcttgtttttatgtgaagattattccttttccaccataggcctcaatgcgctccaaagatccatttgtagataatacaaaaagagtgtttccaaaaggcagaatcaaaagaaatgttcaactctgtgagatgaatgcactcatatgaaagaggtttctcagaattcttctgttaagttttttgtgaagataattcctattaccgcagagccatcaaatggctcccatatatccctttacagatcctacaaaacgactgtttccaagatgatcaattaaaagaaagtttcaaatccatgagatgaatgcacacataacaaatagtattctcagcatgcttttgtctgctttttatgtaaagatatttccttttccaccataggcctcacagtgatccaaatatccacttgcagatactacaaatgagtgtttcaaaactgctcaatcaaacgaaaggaaccacactgtgagatgaatacacacatcacaatgtagtttctgagaatgtttctgtctactttgtatgtgaagttatttccttttcctccataggtttcaaagcgctccaaatttccatttgcagacactacaaaaagattatttccaaattgctcaatgaaaagtaaggttcaaatatttgagatgaatgcacacatcacaaagaagtttctcagaatgcttctgtcttgtttttatgtgaagattgttccttttccaccataggcctcaatgagctccaaagatccatttgtagataatacaaaaagagtatttctgaactgctcaatcaaaagaaatgttcaactgtgtgggatgaatgcactcataagaaagaagtttctcagaatgctgctgtgtagtttttatgtgaagatatttccttttccactataggcctcaaaagctccaaatatccatttgcagatactgcaaaagactgtgtccaaactgctcaatcaaaagaatggttcaactctgagagattaatgctcatatcaccaagaatttttcagaatgtttctgtctaatttttgtgtgaagatattttcttttgcaccataggactcaaagcgctccaaatatacgtttgcagatactgcagaaagactgtttcgaaactgtgcaatcaaaagaaatgttcaacactgtgagattattgcacatatcactaagtagtctctgagaacgcttctgtcttgtttttaggtgaagatatttccttttccaccataggcctcaaagtcctccatatatccactgcagattctacaaaaagaatgtttcaaaactgctcaatcaaaagaaagtttcaactctgtgagatgaatgtgcacatcacaaaacagtttctcagaatgcttctgtctaatttttatgtgaagatatttccttttccactatacaccacaaagggctccacatatccacctacagattctacaaagagtgtttccaaactgctcaatcaaaagaaagattcaaccccgtgagatgaatgcacacatcacaatgtagtttttcagaatacttctgtctattttttatgtaaagctatttccttttccaccatatgcccaaagcgctccaaatatccacttgcagatactacaagaagactgttaccaaactgcttagtaaaaagaaatattcaactctgtgagataaatgcacacatcacaaagaagtatctcagaatacttctgtctagtttttatgtgaagatatttccttctcctccataggcctcaaagtgctccaaataaccatttgcagatagtacaaaaaggctctttccaaactgctcaatcaaaagaaaggttccactctgtgagatgaatgcacacatcaaaaagcagtttgtcagagtgtttctgtctagtttttatgggaatatagtttcttttccaccatagacctcaaacactccaaatatccacttgcaggttctacaaaaagtgtgtttccaaactgctcaatcaaaagaaaagttcaactctgtgagatgaattcacaaattcagaaagaagtttctcagaatgtttctgtttagtttttacgtgttcgtaattcctttttcaccataggccacaatgtgctccaaatatccatttgcacaaacttcaaaacgactgtttccaaacttgtcaatcaaaagaaaggttcacctctgtgagatgaagatacgcatcacaaagaagtttctcagaaaacttctgtctcgtttttctgtgaagttatttccttttccaccctaggcctcaaagcgctgcaaatatccacttgtagattctacaaaacctgtgtttcaaaactgctcaatcaaaataaattttcaactctgagatgaaagcagacaacacaaagtgtttctcagaaagtttctatctattttttctgtgaagataattcttatttcccagaggcatcaaagggctcacaaatatccctttccagattctgcaaaacgactgttccaaactgctcaatcataagaaatgttcaactctgtgagataaatgcacacataacaaagaagtttctcagaatgcttctgtcaagttagtatgagaaaatatatctcttttcaccacagaactcaatgagctcgtaatatccatttgcacatactacaaaaagattgtttccaacatgctcaatgaaaacaaagggccaacaccctgagatgaattcacacatcacaaagaagtttctgagaatgcttctgtctagtttttatgtgaagatatttccttttccaccataggcctcaaagtactccaaatatccacttgcagattcttaaaaagagtgtttccaaactattcaatcaaaagaaagattcaactccgtgagatgattgcacacatcacaaagaggtttctcagaatgtttctctctagtttttatgtgaagatatttcctttcccaacatagtcctcaaatcgctcaaaatatcaacttgcagattctaaaaaggagtgtctcaaaactgctcaatcaaaagaaaaattcaactctgtgagatgaatgcacacatcacgaagaagtttctcagaatgcttctatccagtttttatgtgaagatttttccttttctaccataggctgcaaagctctccaaatattcaattgcagatactacaaaaagactgtttccaaactgctctataaaaagaaagtttcaactctgtgagaataatgcgcacatcacaaagaagtttctcagaaggcttctgtctagtttttatgtgaagatatatccttttccaccataggcctcaaagcgctccaaaaattgtattgcagattcaacaaaaagagtgtttcaaaactgctcaattaaaagaaaggttcaactctgtgagatgaatgcacacatcacaaagaagtttctcagaatgcttctgtctagtttttgtgtgaagttcattccttttccaccataggcctcaaatcactctgaatatccaaatgcagattctcaaaaaagagtgtttccaaatggctcaatcaaaagaaatttcaactctgtagatgaatacacacgtcacaaagaacttcctcagattgcttctgtctagtttttatgtgaagatatttccttttccaccataggcctcaaagcactccaaatatccatttgcagatactacaaaaagactgtttccaaattgctcaatcaaaagaaagtttcaactctgtgagatcgagacacacgtcacaaagaaatttctcagaaattttctgactagtttttatttgaagaaatttccattatgactagaggccttaaagtgctccaaatattatcatgccgatactacaaaaaagactgtttccaaactgctcaataaaaaaaaaaggtttatctctgtgagatgaatgcacacatcacaaagaagtttctcagaaagtttctgtcgagtttttatttgaagacatttcccatttccccttaggtctcaatgggctcagaaatgtaccattgcagagtctacaaaacgaaggtttccaaactgctaaatcaaaagaaagattcaattctgtgagatgaatgcaaacatcacaaatagttttctcagaatgcttctgtctagtttttatgtgaagatatttctttttcaccatatgcctcaaacagcacagaaatatccgtttgcagattgtacaaatactggttccaaactgctcaatcaaaagaaaggctcaactctgtgagatgaaggcacatatcacaaagaattttctcagaatgcttctgtctagtttctatgtgaagatatttcctttttcaccattggcctcaaagcactccatatatccatttgcagatactacaaaaatactgtttccaaacttctcattcaaaaaaaaggttcaactatgtgagttgaatacacacatcacaaagaagtttgtcagaatccctctgtctagtttttatgtgaagatatttccttttccaccatattcctcaaagcgctccaaatatccatttgcagattctaccaaaagagtgtttcaaaactactcaatcaaaagaaaaggtcaactctttgagatgaatgcatacttcacaaagtagtttctgagaatgcttctgtctagtttttttgtgatgatatttccttttttaccataggcctcaaagctatccaaatatccatttgcagatactacaaaaagactgtttccaaactgctcaattgaaagaaagtttattgtatgtgttgaacgcacacattagaaagaagttagtcagaaattttctgtctagtttttaggtggagatatctcctatttcaccataagcctcaatgggctcacaaacatccctttgcagattctacaaaacgagtgtttccaaactgctaaatcaaaagaaacgttcaactctgtgagatgaatgcacaaatcacaaagaagtttctcagaatgcttctgtctagtttttatgtgaagatatttctttttcaccctaggcctcaaacggcatacaaatatccatttgcagattatacaaagactgtctccaaactgctcaatcaaaagaaaagttcaactctgtgagatgaaggaacacatcacaaaggagtttctcagaatgtttctgtctagtttttatgtgaatatatttcctatttccccataggcctcaatgggctttcaaatacacctcagcagtttctacaaaacgactgcttccaagctgctcaatcaaaggaaagtttcaactctgtgaaatgaaagcacacatcagaaaggagtttcttgtaaagcttctgtcttttttttgtgtataggtatttcctatttccccagaggcctcaatgggttcacaaacatccttctgtagattataaaaaacgactgtttccaaactgctcaatcaaaagaaatgttcaactctttgagatgaatgcacacatcaaaaagaagtttctcagaatgcttctatctagtttttatgtgaacatatttccttctctaaaatagtcctgaaagtgctccaaatatccacttgcagattataaaaaaagagtgtttccaaactgctcaatcaaaaaaaatttcaactctgtgagatgaatgcacacatcaaaaagaagtttctcagaatgcttctgtctagtctttttgtgaagatatttccttttccaccgcaggcctcaaagcactccaaatatccatttacagattctccaaaaagagtgtttcacaaattagtttctcagaaaccttctgtctagtttttatgtgaatatatttcctatttccccattggccataaatggctcacaaatatccctgtgcagattctgtgaaaagactgtttcctaactgctcaatcaaaagaaagtttcaacactctgagatgaatgcacacattccaaagtagttcctcagaaacctattgtttagtttttatatgaagatattgtctttttcactgtaggcttcaaagcactccaaatatacctttgcagattctacaaaagtactgtttctaaactgttcaaacaaaagaaagaatcaactctgtgagatgactgcacacatcacaaagtagtttctcagaatgcttctgtccagtttttatgtgaagatatttcctttttcgcaattggcctcaaagcattccaaatatccatttgctaattctacaaaaagactatttccaaagtgctcaatcaaaagaaaagttcaactctgagatgaaagcataccttacaaagcagattctgagaaagcttctgtctcgtttttatgtgaagatattttctatttaaccataggccaaaatgtgctcacaaatatccctttgcacattatacaaaaaggctgtttccagactgctcaattgaaagaaaggttcaaatcactgagatgaacacacacattacaaaaaagttcatcagaatgcttctgtctacttttaatgtgaagatatttctttatcaccataggcatcaaatggctcggatatatccctttgcagagtgttcaaaaagactgttttgacactgctcaattgaaagaaaagttcaactctgtgagatgaatgcacacatcctaaagaattttctcagaaagcttctgtctagtttttatgtgaaggtatttcctatttcaccataggccataaatggctcaaaaaaatcactgtgcagattctacgagaagactgtttccaaactgctcagtcaaaataaatgttcacctctttgggatgaatgcacacatcccaagaagtttcgcagaatacttctgtctagattttatatgtagatatttccttttatgccataggagccaaagcactccaaatatccatttgcagattctacaaaaagactgtttccaaacgaaacgggtgaatcaaaagaaatgttcaactctgtgagatgaaagcatacattaaaaagaagcttctcagaaaacttctttctcgtttttatgtgaagatattacctatttcaccatatgccataatgggcttacaaatatccctgtgcagattctatgaaaagaatgtttccaaagtgctcaatcaaaagaaaatttcaaatctgtgacatgaatgcacacatcacaaataagtttcccagaaagcttctatttagtttttatgtgaagatatttcctttttcaccaaaggcctcaaagcgctccaaatatccatttgcagattctacaaaaagggtatttccaacctgctcaattgaaagaaaggttcaactctgtgagatgaatggatacatttcaaagaagagtctcagaaagcttctgtctagtttttatgtgaagatatttcctatttcaccttagggcataaagggctctcaaatatccctgtgcagattctatgaaaaaactgtttccaaattgctgaatcaagagaaagtttaaactctgtgagatgagtacacacatcacaaagatccttctcagaaaccttctgtttaatttttatgggaagatatttcctttttcaccataggcctttaaccggtcacaaatatccctctacagatactacaaaaagactgtttccaaagtgctccatcaaaagaaaggttcaattctgtgagatgaatacaggcatcacaaagaagtttctcagaatgcttctgtctagtttttatgtgaagatattttctatttcacaataggccataagggactctcaaatgtccctgtggagattctacaaaaagactgtttccaaactgctcaatcaaaagaaaagttcaactttgtgagatgaatgcacacatcacaaagaagtttctcataatgtttctgcctagttttcatgtgaagatatttccttttccaccataggcttcaaagcgttccaattaaccacttgcagattctacaaaaagtgtgtttccaaactgctcaatcagaagaaagtttcaactctgtgagatgaatacacatatcacaaagaagttcctcagaatgcttctgtcttgtttatatgtatagctatttctttttcaccatagccctcaaatggctcggaaatatccatctgcagattgtacaagcaggctgtttgcaaagtgctcaatcaaaggaaagtttcaattctgtgagatgaatgcaggcatcacatgtaagtttcttagaaagcttctgttcagtttttatgtgaagatgttttctttttcactataggcctcaaagcactccaaatatccatttgtggattctacaaaaagagtgcttccaaactgttcattcaaaagaagcgttcaactctgtgagatgaaaacatacatcacaaagaagattctcagaaagcttctgtttagtttttatgtgaagatatttcccttttcccaataggccttaaagtgctccatatatccatttgcagattctacaaaaagactgtttccaaactgctcaatcaaaagaaaggttcaactctgtgagacgaaagcatacattaaaaagaagtttctcagaaagtttctgtctcaattttatgtgaagatattatgtatttcaccatagaccataaagggatcacaaatatccctgtgcagattctaagaaaagactgtttccaaactgctcaatcaaaacaaagtttcaactctgtgaaatgaaatgatacatcacaaagaagtttctaagaaagcttctgtctagtttttatgtgaagatatttcctatttcaccttaggatataaagggctcacaaatatccctgtggagattctacaaaaagactatttccaaactgctcaatcaaaaaaaggtaactttgtgagatgaatacacacatcacaaagaattttctcagaatgcgtctgtctagtttttatgtgaagataattccttttccaccataggcctcaaagcactccaaatatccatttgcagattccacaaaaagactgtttacagtggggtgttaaagtctgccattattattgtttgggagtctaagtctctttgtaggtctctaaggacttgctttatgaatctgcgttctcctgtattggatgcatatatatttaagatagttagatcttcttgttgctttgatccctttaccattatgtaatggctttctttgtctagtttgatctttgttgatttaaagtctgttttatcagagactaggtttgcaacccctgccttttttgttttccatttgtttggtagatcttcctccatccctttattttgagcctatgtgtgtctctgcacctgagatgggtttcctgaatacagcacactgatgggccttgactctttatgcaatttgccagtctgtgtcttttaattggaacatttagcccatttacctttaaagttaatattgttgtgtgtgaatttgatcctgtcattatgatgttagctgttattttgctcgttagttgatgcagtttctccctagcctcgatggccttacaatttggcatgtttttgtagtggctggtaccagtttttcctttccatgtttagtgcttctttcaggagctgttttaaggcatgcctggttttcacaaaatctctcaacatttgcttgtctgtaaagtattttatttttctttcacttttgaagcttagtttggctggatatgaaattctgggttgaaaattcttttctttaagtatgttgaatattggtccccactctcttctggcttgtagagtttctgctgagagacctgctgttagtctgatgggcttccctttgtgggtaacccgagctttctctctggctgcccttaacattttttccttcatttcaactttagtgaatctgacaattatgtgtcttggagttgctcttcttgaggagtctctttggggcattctctgtatttcctgaatttgaatgttggcccgccttgctagattggggaagttctcctggaaaatagcctgcagagtgttttccaacttggttccattctccctgtcactttcagatacaccaatcagacgtagatttggtcttttcacatagtcccatatctcctggaggctttgttcatttcttttttttcttttttctctaaacttcttttcttgcttcatttcattcatttcatcttccatcacagataccctttcttccacttgatcacaatggctactgaggcttctgcatttgtcatgtagctcccatgccttggttttcagctccatcaggtcctttaaggatttctctgcattgtttattctagttatccattcgtctaatttttttacaaagcttttaacttctttgtcattggttcgaatttcctcatgtagctcggagtagtttgatcatctgaagccttcttctctcaactcgtcaaaatcattctccatccagctttgttccattgctggtgaggatctgcgttcctttggaggacaagagacactctgatttttagagtttccagtttttctgctcacttttttcacatctttgtggttttgtctacctttggtctctcatgatggtgatgtacatatgggattttggtgtgcatgtccttgttgtttgttagttttccttctaacaaacaggaccctcggctgcaggtctgttggaatttactagaggtccactgcagaccctgtttgcctgggtatcagcagcggatttgcctgggtatcacacataaaaaagaagttactcagaatgcttctacctagtttttatgtgaagatacttctttttcaccataggactcaaatggttcagaaatatccctttgcagattctacaaaaagtctttttccaaactgctcaatgaaaagaaaggttcaactctgtgagatgaatgcacacatgaaaaagaagtttctcaggatgcttctatctagtttttatgtgaagatatttttttttcaccataggcctcaaatagctcagaaatatccatttgcagattgtacaaaaatactttttccaaactgctcactgaaaagaaagattcaactctgtgagatgaatgcaaatatcacaaagaggtttctcaaaaaacttctgtctagtttttatgtgaagatatttcctttttaaccataggcatcaaaccactcacaaatatccctttgcagattacacaaaaagactgtttccaaactgctcaatgaaaagaaaggttcaaccctgtgagaagaatgcacacatgaaaaagaagtttctcagaacgcttctgtctagtttttatgtgaagatatttctttttcaccataggcctcaatctactcagaaatattcctttgcaggttacacaaaagactgtttacaaactgctcaatgaaaagaaacgttcaacactgtgagaagaacacacacataaaaaaaagtttctcagattgcttctgtctggtttttatgtgaaaatatttccttttttaccataggtctcaatccgctcagaaatatccatttgcagattgtacaaaaatactgtttccaaactgctcactgaaaagaaagggtcaactctgtgagatgaatgcaaacatcacaaaggggtttctcaaagagcttctgtctagtttttatgtgaagatatttcctatctcaccataggccataaatggctctgaaatataactttccacattccacaaaaggactgtttctaaactgctcaatcagaagaaaggttcaactctgtgagacaaatggacacatcacaaagaagattcccagagagtttctgtctagtttttatgtgaagatatttcttttcaaccatcagcctcaaatggctcagaaatatccctttgcagattataaaaaaaaaaaaaaaactgcttccaaactgcttaatcaaaagaaagtttcatccctgtgagatgaatgaccacatcaaaaagaagtttctcagaatgattctgtttagtttttatatgaagatatttcattttcaccatattcctcaaagggctccaaatatccattagcagactctacaaaaagagtgtttccaaactcctcaatcaaaataaagttttaactctgtaagatgaaagcacacatcacaaagaagtttctcagaaagtttctgactactttttatgtgaaaatattacctatttcacaataggactcaatggtttcacaaatatccctttgcagatactaaaaaggactgtttccacaatgctcaaccaaaagaaagtttcaactttgtgagatgaaagcacatatcacaaagaggtttctcaaaatactgctgtctagtttttatgtgaagatatttcctttttcaccataggccttgaaccactcagaaacattcctctgcagatactacaaaaagactgtttccaaactgctacatcaatagaaagtttcaattctgtgagatgaatgcacacaacacaaagaagtttcccagaatacttctgtctagtttctttgtgaagatatttcttttttatcatagcctcaaaatgctccaaatatccatttggagattattcaaaaagtctgtttcaaaactgctcaattaaaggaaacactcaactctgtgagatgaaagcatgcatcacaggaagtttctcagaaagcttctgtctactttttatgtgaacatatttcctatttcaacataggccaaaaagggctcacaaatatccctttgcagattctacaaaaggactgtttccaaactgttcaataaaaagaaactttcaaccctgtgagatgaatgcagacatcacaatgaagtttctcagaatgcttctgtctagtttttatgtgaagatatttcctttttcaacataagcctcaaaatactcacacatatccctatgcagatactacaaaaagactgtttccaaactgctccatcaaaagaaaggttgaactctgttagatgtatgcacacagcacaaagaagtttctcagaatgcttttgcctagtttttatgtgaagatatttcccttttcaccataggcatcaaagcattccaaatattgatttgcagattctacaaaaagactgtttccaaactgctcaatcaaaagaaaagttcaactctgggagttgaatgcacacatcacaaagaagtttctgggaaatattctgtttaggtttatgtgaagatattacctttttgaccataggctggaaagcgctccaaatatccatttgcagattctacaaaaatggtgtttccaaactgctctatcaaaagaaaggttcaactctgtgagatgaatgcacacatcacaaagtagtttatcagaatgcttctgtctagtttttatgtgaagatattgtctttttcaccataggccacaaaacacaccaaatatcaatttgcagattctacaaaaagactgtttccaaactgctcaatcaaaagaaagtttcaactacgggagatgaatgcacacatcacaaagaagtttctcagaaagcttccttttagtttttatgttaaggtatttcctgtttcaccacaggacataaagggctcacaaatatcccttttctggttctacgaaaacactgttaccaaactgctcaatcaaaagaaaggttcaacactgtgagatgaatggacacattacaaagaaatttctcagaaggtttctctctagtttttatatgaagatacttgtttttcacaataggtctcaaaaggctcagaaatatccctttgcaaattgtacaaaaacactgtttccaaactgctctatcaaaagaaagattcaactctgggagaagaatgcaaatgtcacaaagaagtttctcaaaaagcttccattttgcttttagtgaagatatttcctttttcatcataggcctcaaagcgctgcaaatacccatttgaagattctacaaaaagagtgtttccaaactgctcaaacaaaagaaaggttcaactgtgagatgaatgcacacaaaacaaagaagtttctcagaatgcttctgtctagtttttatgtgaagatatttccattttcacaattgtcctgaaagcactccaaatatccatttgcagattctacgaaaatactgtttccaaactgctcaagcaaaagagaggttgaactttgtgagatgaaagcacacagcacaaagaagtttctcagaatgcttctctctagattttatgtgaagatacttctttttcaacacaggcctcaaacgactcagaattatccctttgcagattgtacaaaaagacagtttccaaactgcacaatcaaaagaaaggttcaactctgggagatgaatgcacacatcacaaagaagtttctcacaaagcttctgtttattttttacctgaagatatttcctttttcaccatatacctcaaagcactccaaatatccatttctgtattctacaaaaagaaagtttccaaactgctcaatcaaaagaaaggttcaactctgtgagataaatgcacacatcacaatgaattttctcagaatgtttctgtctagtttttgtgtaaagatatttcatttttatccataggtcttaaatcagtcacaaatatccctttacagatactacaaaaagaatgcttccaacctgctgtatgaaaagaaaggttcaactctgtcacatgagtgaaaccattacaaaggtgtttctcagaataattccgtctagtgtttatgtgatgatatttcatttatcaacacaggccttaaaccacccaaaaatattcctcttcagatactacaaaaggactgtttccaaattgctccaccaaaagaaaggttcaactctgtgagatgaatgcacacatcacaaagaagtttctcagaatgcttctgtctaatttttatgtgaagatatttcctttttcaccgtagacaacaaatcgctccaaatatcaatttgtagattctacaaaaaggctgtttccacactgctcaataaaaagaaaggttcaactctgggagatgaatgcacacatcacaaggaagattctcagaaagcttctgtttagattttttgtgataatagtttctttttcaccacaggcctcaaagcactccaaatatctatttgcaaattctacaaaaagagaatttccaagttgttcaatcaaaagaaaggttcaactctttgagacaaatgcacacataacaaagaagtttctcagaatgattctgtctagcttttatgtgaagatatttcctttttcaccgtagaccttagacagctcaaaaatatccctctgcagatactacaaaaagactgtttccaaactgttccatcaaaacaaggttcaactctgtaagatgaatgcacacatcacaaagaagtttctcagaatgcttctgcctagttttgatgtgaagatatttcctttttcaactttgccctcaaagtgccccaaatatccatttgcagatgctacaaaaagacagtttccaaacttttcaaaaaaagaaacgttcaactctgtgagatgaaagcatacatcacaaagaagtttcttagaaaacttctgtctagtttttatgtgaagatatttcctatttcaccataggtcataaagggctcacaaatatcactttgcaggttctacgagaacactttttccaaactgctcaatcaaaatagagcttcaactctgtgacatgaatgcacacatcacaaagaattttctcagaatgcttctgtctagtttttatgtgaagatatttcctttttcaccatagacactaaagcattcacaaatatccctctgtatactctacaaaaagactgtttctaaaattatccttcaaaagaaagttgaactctgagatgaatgcacacttcacaaaggaatttctcagaatgcttatgtctagtttttatgtgaagatattccctttttcacgatagtcctcaaagcattacaaatattcatttgaagattctacaaaaagacagtttccaaatttctcaatcaaaagaaagtttcaactctgtgagatgaaaacacacatcacaaagaagtttctcagaaagcttctgtctagtttttatgtgaacatatttcctatttcaccataggcctcaatgggctcacaaatatccctttgcagattctacaaaagcactgtttccaaacttgtcaataaaaagaaaggtttgactctgtgaggtgaattcacacatcacaaagaagtttctcagaatgcttctgtatagtttttatgtgaagatatttcctttttcacagtaggcctcaaagcgcttcaaatatccactcgcagattctacacaaagactgtttccacactgctcaatcaaaggaagtttcaactctgtgtaatgaatgcacatatcacaaagaaatttctcagaaaacttctgtttagtttttacatgaagttatttcctttttttccatagacctcaaagcactccaaatatccatttgcagattctacagaaagagtgtttccaaactgctcaatcaaaagaatgtttcaactctgtgagatgaaagcatgcattacaaagaactttctcagaaagcttctgtttagttttcttgtgaagatatttcctatttcacaatcacctcaatgagctcacaaatatcccattgcagattctacaaaaggactgttttgaaactgttcaaacaaaagaaaggttcaattctgtgaaatgaatgcacacatcacaaagaactttttcagaatgattctgtctagtttttatgtgaagatatttcctttttcatcatattcctcaaagcactccaaatatccatttgcagattctaccaaaagactatttccaactgctcaagaaaaagaagggttcaaccctgtgagatgaatgcacacatcacaaagatgtctttcagaatgcttctgtctagtttttatgggaaaatatttcctatttcaccataggcaataaaaggctcaaatatatcactttgcagattctacaaaaagactgtttccaaactgctcagacaaaagaaagtttcaactctgtgagataaatggacacatcacaaagaagttcctcagaatgcttctctcgagtttttctgtgaaggtattactttttcaccataggcctcaaacagctctgaaatatcccttgcagattgtaggaaaagacagtttccaaactgctcaatgaaaagaaagcttcaatactgtgagatgaatgcacccatcacaaagaagtttctcacaaagcttctgtctagtttttatgtgaagatatttcctatttcacaataggcctcaatcagctcacaaatatcccttttgcagatactacaaaagcactgtttccaaactgttccaacaaaactaatgttcaactctgtgaaatgaatgcacacatcaaaaagaagtttctcagactgcttctgtgtacttactatgtgaaggtatttcctttttcaccatagacctcaaagctctccaaatatccattttcagattctacctaaagactgtttccaaactgctcaaacaaaagaaaggttcaactatcagaaatgaatggacacaacacaaagaagtttctcagaatgcttctgtctaatttttatgtgaaatatttcctatttcaccatatgccataaagggctcaaaaatatctctttgcagaatgtacaaaaagacagtttccaaactgctcaaagaaaacaaaggttcaaatctgtgagatcaatggatacatcacaaacaagtttctcagaatgcttctgtctagtttttatgtgaacacattacttttccaccataggcctcaagcagctcacaaatattcccttacagattgtacaaaaagagtgtttccaaactgctcaatcaatagaaactttcaactctgtgagatgaaagcatacatcacagagatgtttctcagaaagcttctgtctagtttttgtgtgaagatatttcctatttcaccatacgccatcaatggatcacagatatcccattccagattctgcaagaggacactttccaaactgttcaatcaaaagaaaggtgcaactctgtgagatgactgcacacatcacaaataagtttctcagaatgcttctgtctagattttatgcgaggacatttgctgtgtcaccataggcctcaaagtgatccaaatatccatttgcagatactacataaacactgtttgcaagctgctcaatcaaaagaaaggttgaactctgtgagatgaaagcatacatctcaaagaagtttcccacaaaccttctgtgtcgtttttatgtggagatatttcatattgcacaataggccataaacggctcacaaatatccttttgcagattgtacaaaaagactgtttccaaactgctcaatcaaaagaaaagttcaacgtgtgagacgaatgtgcacatcacaaaggagtttctcagaatgcttctgtctagtttttatgtgaagatatttccttcttcaccacaggcctcaaagtgctccaaatattcatttgcagattctacaaagagactctttccaaactgctcaatcaaaagaaagattgatctctttgagatgaaagcacacatcacaaaaagtttcacagaaaacttctgtctagtttttatgtgataatatttcctatttcatgatatgcttccatgtgctcacaaatatcccttttcagattctacaaaaggactgtttccaaactgttcaatcaaaaaaaaggttcaactctgagagatgaatgcacacatcacaaagaagtttctcataaagcctctgtttagtttttatgtgaatatatttcctttttcaccatctgcctcaatgtgctgcaaatatccatttgcagattctacaaaaagagtgtttccaaactgctccatcaaaaaaaaggttcaattccatgagatgaatgcacccatcacaaaggagtttctcaaaatgcctctgtctaattttttttttttgatgatatttcattttccactataggtctcaaagtgctgcaaatatccatttgcagattctacaaaacaactgtttccaaactgctctatcataattaaggttcaactctgggagaggaaatcacacataacaaagaagttcctcagaaacttctgtctagtttttgtgtgaagatatttcctatttcaccataggccacaaagggctcaaaagtatccctttgcagattctgcaaaaggactcgttcaaaacagcccactcaaaggaaagtttcatctgtgtgagatgaatacacagatgacaaagtagtttcttagaatgcttctgtctagtttttatgtgaagatatttcctttttcatcataggccttaaaccactcacaaatatacctctgcagatactacaaaacgactgtttgccaactactcaatcaaaggaaaggtgcatctctgtgagatgaatgcacacatcacagagaagcttatcagaatgcttctgtctaatttttatgtgaagatatttcctttttcaccataggcctcaatgtgctctaaatatccatttgtagaccacacaaaaagacggtttccaaactgctcaatcaaaagaaagtttcaactctggtagatgaaatcatatatgacaaagaagtttctcagaaagcttctgtctagtttttgaatggagatatttcctatttcaccaaaggacagaaatggctcaaaaatatacattttcagattctacaaaaggactctttacaaactgctccatcaaaagaaagtttcaattctgtgagatgaatacaccgattacaaaaagattctcagaatgcttctgtctagtttttatgtgaagatattttctttttcaccataggcattacattgctcacaaatatccctctgcagctactacaaaaagaccgtttccaaaatgctcattcaaaagaaaggttcaactctgtgacatgaaagggcacatcactatgaagtttctcagaatgcttctctctagtttttaaatgaaggtacttctttttcaccataggcccaaatgggctcacaaatatccctttacagattgtagaaaaggactgcttccaaactgatcaaatgaaagaaagtttcaactctgtgagatgaatgcaaacatcacaaagaagttcctcagaatgcttctgcctagtttttatgtgaagatatttcctttttcaccataggcctcaaagtgcttcaaatatccatttgcagattctaccaaaagactgtttccaaactgctcaaacaaaagagagattcaactatcagaaatgaatggacacaacacaaagaagtttctcagaatgcctcggtgcactttttatgtgaaaatacttatttttcaccacagacctcaaatgtctcggaaacatcccttgcagatcgtacaaaaagactgtttccaaactgctcaatcaaaagtaggtttcaaatctgtgaggtgaatgcacccatcacaaagaagtttctcagaaaacttctcttattttttctgtgaagatatttcctttttcaccacaggcctccaagcactccaaatatccatatgcagattatacaaaaagaatgtttccaaactgctccatcaaaaaaaggttcaactctgtgagatgaatgcacacatcatagaggagtttgttagaattcttctgtctagtttttatgtgatgatatttcctttttcaccataggcctaaactgctcacaaatatccctctgcagataatatgaaaagactgtttccaaactgctccatcaaaagaaagcttcaactttgtgagaggaatgcacacaacaaaaagcagtttctcagaatgcttctgtctagattttatgtcaagatatttcctttttctccataggcctgaaagtgctccaaatattcatttgtagattctacaaaaagactgtttctaaactgctcaatcaaagaaaggttcaactctgtgggatgaaagcacacatcacaaattagtttctcagaaagcttctgtctaggttttatgtaaagatatttcctatttagcataggccacaatgggctcacaaatatccctctgcagattcttctaatggactgtttccaaactgttcaagaaaaaaaagcggtgttgccaaactgctccaaaaaacgaaatgttcaactctgtgaggtaaatgcacacatcacaaagaagtttctcagaatgcttcagtctagtttttatgtgaagatacttccttttggaccataggcctcaaagctctccaaatgtccatttggagatcctacaaaaacactgcttccaaactgctcaatgaaaagtaacgttcaactccgtgggaagaaagcatacatcacaaagtttctcagaaagtttctgtctagttttggagtgaacatatttcctatttcatcgtaggccataaagggctcacaaatatccctctgcaaattctacgaaaggactctctccaaactgctcaatcaaaagaaaggctcaactctgtgagatgaatgcaaatatcacaaaaaaattctcagaatgcttctgtctagtttttatgtgaaggtatttcctttttcaccatagtcctcaaagtgctccaagtatagatttgtagattctacaaaaagattttgtcgaaactactcaatcaaaagaaaggttgaacactgggagatgaatgcacaaatcacaaaggagtttctcagaatgcttctgtctagtttttatgtgaagatatttcctttttcatcataggccttaaaccggtcacaattatccctatgcagatactacaagaagactgtttccaagctgctccatcaaaagaaaagttcaactctgagaaatgaatgcacacatcacaaagaagtttctcagaatgcttctgtctagttactatgtgaagatatttcctttttcaccataggtctcaaaacgctccaaatacccatttgcagattctacaaaaagactatttctaaactgcacaatcatcagaaaggttcaagtctatgagatggaaacatacatcagatagaagtttctcagtaagcttctgtctagtttttatgtgaagatatttcccttttcaccataggccttaaactgctcacaaatatccctctgcacatactacaaagagactctttccaaacttctccatcaaaggaaaggttcaactctgtgagatgattgcaaacatcacaaaagattttgtcagaattcttctgtctagttttaatgtgaagatgtttcctttttcaccttcagcctcaaagcgctccaaatatccagttgcatattctacaaaaatgctttttccaaactgctcaatccaaagaatggttcaatgccatgaaatgaaagcacacatcacaaagtagtttgtcagaaagcttctgtctggtttttattgaagatatttcctgtttcaccataggcttcaatgggcataaaaatatccctttgcagattttacaaaaggactgtttccaaacagttcaaacaaaagagaggttcaactctgtgagatgcaatcacacatcacaaaaaagtttgtcaaaatgcttctgtctactttttatgttgatatatttcctttttcatcataggacataaagggctgaaaaatatccctttgcagattgtacaaaaagactgtttccaaactgatgaatcaaaagaaaggttcaacactttgagatgaatggacacaacacaaataagtttctcataatgcttctgtataatttttatgtgaagatacttctttttcaccgtaggcctcaaacagcttggaattatccatttgcagattgtacaaaaagactgattccaaactgttcaatcaaaaggaacgttcaaatctgtgagaggaatgcacacatcacaaagaagtttctcagaaagcttctgtttagtttttatgtggagatatttcctttttcactataggccttgaagcactacaaatatccatttgtagagtctacaaaagagtttttccaaactgctccatcaaaagaaaggttgaactgtgagagatgaagcatacagaacaaagaagtttctcagaaatattctgtctagtttttatgtgaagatatttcctatttcaccataggccataaagttctcacaaatatccctttgcagattctacaaaaacagtgtttccaaactgttcaatcaaagaaaggttcaaccctctgagacgaatgcaggcatcacaaagaagtttctcagaattcttctctctagttgttatgtgaagatattttctttttcaccataggcctcatagcattccaaatgcccatttgcaaattctacaaaaagactgtttccaaactgctcaataaaaacaaacgttcatctctgtgagatgaaatcatacatcacaaagaagtttctcagtgaacttctgtctagtttttatgtgaagatatttcctttttcaccatagtacttaaactgctcacaaatatccctctgcagaaacttcaaaaagactctttccaaactgctccatcaaaggaaaggttcgtctctgtgagatgaatgcacacagagcaaagaagtttctaagaatgcttctgtctagtttttatgtgaagatacttcatttttcaccataggccctaactgctcacaaatatcgctctgcagttactacaaaaagactccttccaacgtgcaccatcaaaagaaacgttcagctctgtgagatgcatgcacacatcacaaaggagtttctcaaaatgcctttgtctagtttttatgtgtagatatttccttttcaacataggcctcaaagtgctccaaatatccacttgcagattctacaaatagacggtttccaaactgctcaatcaaaagaaaggttcaactctgtgagatgaatgcaaacatcaaaaagaaggttctcagaaagcttctgtctgcttttatgtgaagatatttcctatttcatcataggccataaagggctcacaaatatccctttacagatcctacgaaaagactgtttacaaaatgctcaatcaaaagaaagtttcaactctgtgagatgaatggacacatccaaaagaagtttctcagaatgcttctgtctagtttttatgtgaggatgtttctttttcaccataggcctaaaacagctcagaaatatccctttgcagattctacaagaagactgtttcgaatctgctccatcaaaagaagggctcaactctttgagatgaatgcaggcatcacaaagaagtttctcagaatgcttccatctggttttatgtgaagatatttcctttttcaccgtatacctcaaagggctccaagtatccatttgtagattccacaaaaatgctttttccaaactgctcaatcaaaagaaaggttcaactctgagagacgaaagcatacatcataaagaagtttctcagaaagcttctgtctagtttttatttgaagatatttcctattccacagtaggccatacagggctcaaaaatatccctttgcagattctatgaaaagactgtttcaaaattgctcaatcaaaagaaagtttcaaatctgggagatgaatggacacattacaaagaagttttttagaatacttctgtctagtttttatgtgaagaaatttcctttttcaccataggcctcaaagtgctccaaatatgcatttgtagattctacaaaaaactgaattcttttttttttttgatttggaaatactactttattcctttataatcaatatatatatcttaatactttctgtgtgtcagataatacactgggtcctgaggaaaacaaggtataaaaataatttttctcatacttgagaagatttcagtctagcggggaatgattgagaggagtcatttcccaaaaagactgatttctaaatgctccatgaaaagagaggatcaactctgtgagatgaaggcacacatcacaaagaacttactcagagtgtttccgtttagtttttatgtgaagatgttccctatttcaccataggcattaaactgcgcacaaatatccctctgcagataatacaaaaggacgggttccaaactgctccatcaaaagaaatgttcaactctgtgagatgaatgcacacatcgcaaagtagtttctcagaaagcttctgcttagtttttatgtgaagatatttcctttttcacaataggccttaaaacgctcaaaatatccatttgcagattctacaaaaagactgtttccaaactgctcaatcaaaaagaggttcaactctgtgagatgaatgcaaacatcacaaagaactttctcagaaacatctgtctgcttttaagttgaagacatttcctatttcaccatagaccataaagggcttacaaatatccctttgcagattctacaaaaagaatttttccaaactgctcaatcagaagaaagtttcaacactgtgagatgaatggacatatcacaaagaattttctcagaaagcttctgtctagttttttatgtgaggatatttatttttaatcataggcctcaacagctcagaaatatcactttgcagattgtacaagaagactgtttcgaaactgctccatcaatagaaaggttcaacactttgagatgaatgcaggcatcacaaagaagtttctcaggatgcttctgtctagtttctatgtgaagatatttccttttttaccataggcctcaaagtgctataaatatccatttgcagattctacaaaaagactgtttccaaacttctcaatcaaaagaaggattcaaatgtctgagatgaaccaacacattataaagaagtttcaaagaatgcttctgtctagtatttatgtggagatattcgctttttcatcataggccttaaaccggacacaaatatccctctgcagatacttcaaaaagactcttttggaacttctccatcaaaagaaagtttcaactttgtgagatgaatgcacacatcaccaagaagtttctcagacagactcagtctagtttttatgcgaagatatttcctttttcaccatagtcctcaaagcgctccaaatatccatttgcagattctacaaaaagactgtttccaactgctcaatcaaaagaaagtttcaactctgtgagatgaaagcatacatcacaaagaaatttctcagaaatcttctgtcttctttttatgtgaagatatttcctatttcaccataggccataaagagctcaaaaatatccctgtgcagattctttgaaaacactgcttccaaatgctcaatcaaaagaaaggttcaactctgtgagatgaatgcacacatcacaaagaagtttctcagactccttctgtctagtttttatgtgaagacattctttattcaccataggcctcaaacagctcagaaatatccatttgcagattgtacaaaaagactgtttccaaactgcttaatcaaaagaaagtttcaactctgtgaaattaatgcaggtatcaaaaagaagtttctcagaatgcttcagtctaatttttatgtggagatatttcctttttcactataggcctcaaagtgcttcaaatatccatttgcagattctacaaaaaggctgtttccaaactgcttaatgaaaagacagtttcaagtctgtgagatgaatacacacatctctaagaagtttcttagaatgattctctctagcttttatgtgtagatattttctttttcaccataggccttaaatcggtcacaaatatcccccagcagatacttcaaaaagacgtttccaaactgctccatcaaaagaaatattcaaacctctgagatgaatgcacacatcacagtgaagtttatcagaatgcttctgtctaatttttaagtgaagatatattctttttcaccataggcctcaaaaccctccaaatatccacttgcagattatacaaaaagactgtttctaaacagctcaatcaaaaagaaggttcaactctgtgagatgaaagcatacatcacaaagaagttcctcagaaagctactgtctagttttgatgtgaagatattttctatttcaccataggccacaatgggctcacaagtatccctgttcagattctatgaaaagactgtttccaaactgctcaaacaaaggagagattcaactctgtgagacgaatgcacacatcacaaagaagtttctcagagttattctgcctagtttttatgtaaagatatttcctttatcaccataggcctcaaagcactccaaatatccatttgaagattctacaaaaagagtttttccaacctgctcaatcaaaagaaagattcaactctgcgagatgaaggcacatgtcacaaaaaagtttctcagaatgcttctgtccactttttatgtgaagatatttcctttttcatcattggcctcaaagcgctccaaatatccttttacagattctacaaaaagactgtttcctaactgctcaatcaaagcaaaggcttaactctgtgagatgaatgcactcatcacaaacaagcttctcagattgcttctgtctagttctgatatttagatattcctttttcaccatagggcacaaacggctcaaaaatatccatttgcagattgtacaaaaagactgtttccaaattgctcaatgaaaagaaaggttcaactctgtgaaatgcatgcaggtatcacaaagaagtttctcagagtgcttctgtctattttttatatgaagatatttccttttcaccatagacatcaaagccctccaaatatccatttgcagattctaaaaaaatactgctttcaaactgctcaatcaaaaggaagcttcaactctgtaagatgaatgcacacatcacaaagtttcccagaatgcttctgtctagtttttatcacaagatatttcctatgtaaatgtatgcctcaaagcgattcaaatatccatttgaagattctacaaaaagagtgtttccaacaagttcaatcaaaagaaaattcaactttgtgagatgaatgcacacatcacaaagaagtttctctaaacgcttctgtatagtttttatgtgaagatatttcctttttcaccatagaccttaaacacgtcacaaatatccctcagcagatactacaaaaagagtgtttccaaagtgctccatgaaaagaaagcttcaactctgtgagatgaaagcctacatcacaaagaagtttctcagaatgcttctgtctactttttatgtgaagatatctctttttcacaataggcctcaaacggttcagaaatatccctttgcagattgtacaaaaagactgtttccaaattgctcaatcaaaagaaagtttcaactctgtgtgatgaatgcaggtatcacaaagaagtttctcagaaaggttctgtctagtatttacgtgaagtgatttactatttcaccacaggccgtaaagggctcaaaagtatcccagtgcatattctacagaaagactgtttccaaagtgcttcatctaaagaaaggttcagcactgtgagatgaatacacacatcacaaagaagtttctctgaatgctattgtatagtatttatatgaagatatttcctttttcaccataggccacaatcctctccaaatgtcaatttgcagattctataaaaacagtgtttctaacctgctcaatcaaaagaatggttcaactctgtgagatgaatgcacacatcaccaagaagtttctcagaatgtttctgtctcgtttttatgtaaagatacttcctttttcaccaagggccttaaaccaatcacaaatatctctctgtagatactacaaaaagactgtttccaaagtcctccatcaaaagaaaatttcaactctgtgagacgaatgcacacatcatgaagaagtttctcagaatgcttctgtctagtttttatatgaatatacttcttttttcaccataggcctcaaagcactccaaatatccatttgcagactctacaaaaagagtgttttcaacgtgctcaatcaaaacaaaggttcatctcagtgagatgaatgcacacatcacaaagatgtttttcagaatggttctgtctagtatttatgtgaagatatttcctttatcaccgtaggccttaaaccggtcacaaatatccatctgcagataccacaaaaagactatttccaaagtgctccatgaaaagaaaggttcaatcctgtaacatgaatgaacacatcacaaagaagtttctcagaatgcttctgtctagtttttatgtgaagatacttctttttaaacattgtcctcaaaaggctcagaaatatccctttgcagattgtacgaaaagactgcctcaaaactgctcagtcagaagaaagtttcaactctgagatgaatgtaggcatcacaaagaagtttctcagaatgcttctgtctagtttctacatgaagatattacctatttcaccataggccaaaaagggctcacaaatatccctgttcaaattctacgtatacacggtttccaaactgctccatcagaagacacgttcaactctgtgagatgaatgcacacatcacaaagaagtttctcaggtgattctgtgttgtttttatgtgaagatattccatttttcaccagagacctcaaagtgttgcaaatatccatttgcagatgctacaaaaagagtgttaacaacctgctcaatcaaaagaaaggttcaactctgtgagctgaatgcacacatcaaaaagatatttctcagaatgcttctgtccagtttttatgtgaagatatttccattttcaccattggccttaaaccggtcactaatatcactctgcagatactactaaacgactgtttccaaactgttacatcaaaagaaaggttcaacactgtgaaacgaatgcactcatcacaaagaagtttctctgaatgcttctgtgtagtttttctgtgaagatatttcctttttcaccataggactcaaagcgttccaaatatccatttgcagatctacaaaaagacagtttccaaagtgctcaatcaaaagaaacgttcaactgtttgagatgaaagcatatatcacaaagaattttatcagaaaacttctatctagtttttatgtgaggatatttcctacttcaccataggccataaggggctcacaaatatccctgtgcagattctacgaaaagactgtttccaaactgctcaatgaaaagaaagtttcaactcagtgagatgaatgcacacagcacaaagaagtttctcagaatgcttctgtctagtttttatgtgaagatatttcctttttcaccacaagccctaaaccagtcacaaatatccccttgcagatactataaaaaggctgtttccaaagtgctccatgaaaagaaaagttcaactctgtgagatgaatgcaggcatcaaaagaagtttctcaaaatgcttctttccagttcttatctgaagatatttagtttttcaccatagtccttaaattgctcaaaatatccatttgcagaatctacaaaaagactgtttccaaactgctcaatcaaataaaagttcaactctgtgagatgaatacacccatcacaaagaagtttctcagaatgcttctgtctactctttatgtgatgataattcctttttcaccataggcctcaaagggctccaagtatccatttgcagcttctaaaaaaagagcatttccaactggctctatcaaaagaaagtttcagttctgtgagatgaatgcacacatcacagagcagtttctcagaatgcttctgtctagtttttatatgaagatatttcctttttcaccacaggccttaaaccgttcacaaacatcccactgcagataatacaaaaagactgtttcccaattgctccatgaaaacaaaaggttcaactctgtcagatgaatgcacacaccaaaaagaagtttcccagaatccttctgtctagtttttatgtgaagatatttccttgttcaccttaggcctcaaaccactccaaatatccatttgcagactctacaaaaagatgtttccaacctgctcaatcaaaagaaaggttctattctgtgagatgaaagcacacgtcacaaagaactttctcagaatacttctgtctagtttttatgtgaagatatttcctttttcaacataagtcttaagcctcgcacaaatatccctctacagatacttcacaagcactgtttggaaactgctccatcaaaataaattttcaactctgtgagatgagtgcacagatcacaaggaagttcctcagaatgcttctgtctagtttttattggaagttatttctttttcaccatatgcctcaaacagctcggaaatatccctttggataaggtttaaacagactgtttccaaattgctcaatcagaagagagcttcaactctgagatgaatgcaggcatccaaaagaagtttctcagaatgtttctttctagtttttatgtgaagatatttcctttttcaccataggcctcaaatcgctccaaatatccatttgcagtttctacaaaaagactgtttccaaactgctcaaccaaagaaaagttcaactcggtgagatgaatgctcacatcacaaataaatttctgacagtgcttctgccagaagcaaatcgatatttgctatttcaaaatagggtgtaaagggctcacaaatatatctgtgtagattttatgaaaaaactgtttccaaactgctcaatcaaaagattcaactctgtgaaatgaatgcagatatcacatagaagttcctcagaataattctgtctagtttttatgtgaagatatttcctttatcaccataggcctcaaagtgctccaaatatccctttgcagattctacaaaatgatggattccaaactgctctatcaaaagaacggtacaactctgtgagatgaatgcacacatcacaaagaagtctctcagaatgcttctgtctggtttttaagtgaagatatttcctttttcaccaaaggcttcaaagcgctccaaatatccatttgcagattctacaaaaagagtgtatccaacctgctcaataaaagaatggttcaactctgtgagatgaattcacacatcacaaagcagtttctcagaatgcttctgtctagtttttatgagaagatatttcctttttcacccgaggccttaaaccagtcacaaatatccctctgcagattctacaaaaagactctttctaaactgctccatcaaaagaagggttcaactcggtgagatgaatgcacacatcacaaagaagtttctcagaatggttctgtctaattcttctgtgaagatatttcctttttcaccacaggcctcaaagcgctctgaatatccatttccagattctacaaaaagactgtttccaaactgctcaatcaaaaggaatgttcaactctgtgagatggaagcaaacatcacaaggaagtttctcagaaagcttctgtctagcttttatgtgaaatacttcctatttcaccacaggctataaagggctgacaaatatccctgtgcagattctatgaaaagactgtttccaaactgctcaatcaaaagaaaggttcaacgctgtgaaatgaatgcaagcatcacaaagaagtttcccagaaagcttatgtttactttttatgtgaagatatttcctttttcaccataggacccacagcgctccaaatatacatttgcagattctacaaaaagacttttttcaaactgctcaatgaaaagaaagcttcaactctgtgagatgaatgcacaaatctcaaagcagcttctctcaatgcttctgtcaggtttttatgtgaatatatttcctttttctccataagccatagagggctcacatatatgctcttgcagattctaccaaaaaccatttccgaattgctcaatcaagaggatggctcaaccatttgagatgaatggactcatgacaaagaagtttctcagaatgcttctgtctagtagttatatgaagatatttctttttcaccataggcctcaaactgctcagaaatatccctttgcagattgtacaaaaagactgtttccaaagagtttaattaaaatgaatgttcaagactgtgagatgaatggacacaacacaaaaaagtttctcagaaaactcctgttcagtttttatgtgaaaatatttcgtttttcaccataggcctcaaatcgctccaaatatccttttgcggattctacaaaaagagtgtttccaaattgctcaaacaaaagaaacattcaactctgtgagatagaagctcgcatcacaaagaggtttctcagaaagattcagtttagtttttatatgaagatatttcctttttcaacataggaatcaatgggctcagaaatatcccttttcagattctacaaaaggactgtttccaaactgctcaatccaaagaaaggttcaactcttgagagatgaatacacacatcacagagaagtttctctgaatgcttctgtgtagtttttatgtgaggatatgtctttttcaccataggcctcaaacagctcacaaatatccctctgcagataccatgaaaagactgcttccaaactgctcaatcaaaagaaaggttcaactctgagcagtttttatgtatctcaggatacaaaatcaaggtacaaaaatcacaagcattcgtatgcaccaataacagacaaacagagagccaaatcatgagtgaactcccattcacaattgcttcaaaggtaataaaatactcaggaattcaacttacaagggacatgaaggacttcttcaaggagaacaacaaactactgctcaatgaaataaaagaggatacaaagaaatggaagaacattccatgctcatgggtaggaaggagcaatatcgtgaaaatggccatactgcccaaggtaatttatcgattcaatgacatccccattaagctgccaatgactttcatcacagaattggaaaaaagtactttaaagttcatatggaaccaataaagagcctgcattgccaagtcaatcctaagccaaaagaataaacctggaagaatcacgctacctgacttcaaactatactacaaggctactgtaaccaaaactgcatggtactggtaacaaaccagagatatagatcaatggaacagaacagagccctcagaaataacgccgcatatctaaaacaatctgatctttgacaaacctgagaaaaacaagcaatggggaaatgatcacctatttaataaatggtgctgggaaaactggctagccatgtggagaaagctgaagaaggatcacttccttacgcctaaaacaaaaattaattcaagatggattaaagtcttaaacattagacctaaaaccataaaaaccctagaagaaaacctaggctttaccattcaggacataggcatgggcaaggacttcatgtctaaaacaccaaaagcaatggcaacaaaagccaaaattgaccaacgggatctaattaaactaaagagcttctgcacagcaaaagaaactaccatcagagtgaacaggcaacctacaaaatgggagaaaagttttgcaacctactcatctgacaaagggctaatatccagaatctacaaagaactcaaacaaatttacaagaaaaaaacaaacaaccccatcaaaaagtgggtgaaagacatgaacggacacttctcaaaagaagacatttatgcagccaaaaaacacatgaaaaaatgctcaccatcactggccatcagagaaatgcaaatcaaaaccacaatgagataccatctcaaaccagtcagaatggtgatcattaaaaagtcaggaaacaacagatgctggagaggatgtggagaaataggaacacttttacactgttggagggactgtaaactagttcaaccattgtggaagtcagtgtggtgattcctcagggatctagaaccagaaataccatttgacccagccatcccattactgggtatatactgaaaggactataaatcacgctgctataaagaaacatgcgcacgtatgtttatagctgcactattcacaatagcaaagatttggaaccaaactaaatgtccaacaatgatagactgaattaagaaaatgtggcacatatacatcatagaatactatgcagccataaaaaatgatgacttcaggtcctttgtacggacatggatgaaattggaaatcatcattctcagtaaactatcgcaaggacaaaaaaacaaaaaccgcatattctcactcataggtgggaatggaaaaatgagaacaaatggacacaggaaggggaacatcacactctgggatggttgtggggtggggggaggggggatagcattaggagatatacctaatgctaaatgacgagttaatgggtgcagcacaccagcatggcacatgtatacatatgtaactaacctgcacattgtgcacatgtaccctaaaatttaagtatactaataataaaataaataaaaaagaagcattctgagaaaccactttgtgatgtgtgcattcatctcacagaactgaaactttcctttgattcagcagctttgaaacactctttttgtagaatctgcaagtggatatttggagcgctttgaggcctattgtggaaaaggaaatatcctcacacaaaaactacacataagcattctgagaaacttctttgtgatgtgtgcattcaattcacagtgttgaacctgtctttcgattcagcagttttgaaacactctttttgtaaaatctgtaagtggatattggagcactttgaggtctgtagtggaaaaggaaataccttcatccaaaaactacacagaagcattctgagaaacttctttgtgatatgtgcattcatctcacagaactgaaactttcctttgattcagcagctttgaaacactctttttgtagaatctgcaagtggatatttggagcgctttgaggcctattgtggaaaaggaaatatcttcacacaaaaactacacataagcattctgagaaacttctttgtgatgtgtgcattcaactcacagtgttgaacctgtcttttgattcagcagttttgaaacactctttttgtaaaatctgtaagtggatattggagcactttgaggtctgtagtggaaaaggaaataccttcatccaaaaactacacagaagcattctgagaaacttctttgtgatatgtgcattcatctcacagagttgaacctttcttttgattgagcagtttggaaacaccctttttatggaacctgcaagtggatatttggaacgctttgaggcctatggtggaaaaggaaatatcttcacatgaaaactagacagaaacattatgagaaacttctttgtgatgtgtgcattcatgtcacagagttgaacctaagttttgatagaccagttttgtaactctctttttgaataatctgccagtggatatttagagcccttagtggcctatggagaaaaggaaatatcttcacattgaaactacacagaagtattctgagaaacttctttgtgatgtgtgcattcaactcacagtgttgaacctatcttttgattcagcagctttgaaacactctttttgtagaatctgcaagtggatattggagctctttgaggcctatagtggaaaaggaaataccttcacccaaaaactacacagacgcattctgagaaacttctttgcgatatatgcattcatctcagagagttgaacctttcttttgattcagcagtttggaaacaccctttttatagcatctgccagtggatatttggggcactttgaggcctatggtggaaaaggaaatatcttcacataaaaactagacagaagaattatgagaaacttctttttgatgtgtgcattcaactcccagagttgaacctaagttttgatagaccagttttgaaactctctttttgaataatctgcaagtggatatttagagcccttagcagcctatggaaaaaaggaaatatcttcacattaaaactacacagaagcattctgagaaacttctttgtgatgtgtgcattcaactcacattgttgaacgtatctttttttttttattatacttgaagttttagggtacatgtgcacaatgtgcaggttagttacatatgtatacatgtgccatgctggtgtgctgcacccattgaatcgtcagttatcattaggaatatctcccaatgctatccctccctcctcaccacaccccacaactgtccccatagtgtgatgttccccttcctgtgtccatgtgttctcattgatcaattcccacctatgagagaatatgtggtgtttggttttttgttcttgtgatagtttactgagaatgatgatttccaatttcatccatgtccctataaaggacatgaactcataattttttatggctgcatatattccatggtgtatatgtgccacattttcttaatccagtctgattgttggacatttgtgttggttccaagtctttgctattgtgaatagggccacaataaatatacgtgtgcatgtgtctttatagaagcatgatttatagtcctttgggtatatacccagtaatggaatggctgggtcaaatggtatttctagttctagatccctgaggaatcgccatactgacttccacaatggttgaactagtttacagtccctccaacagtgtaaaagtgttcctattccttcacatcctctccagcacctgttgtttcctgactttttaatgattgccattctaactggcttgagatggtatctcattgtggttttgatttgcatttctctgatagccagttatggtgagcattttttcatgtatttttggctgcataaatgtctccttttgagaagtgtctgttcatgtcctttgctccctttttgatggggttgtttttttttttcctgtaaattttttgagttcattgtagattctggatattagccctttgtcaggtgctagattgtgaaacttttctcccattttgtaggctgtctgttcactctaatggtagtttcttttgctgtgcagaagctctttagtttaattagatcccttttgtcattttggcttttgttgccattgtttttggtgttttagagatgagttccttgcccatgcctatgtcctgaatggtaatgcttaggatttcttctagagttcttatggttttaagtctaacgtttaagtctttaatccgtcttgaattaatttttttataaagtgtaaggaaaggatccagtttcagctttctctgtatggctagccagttttcccagaaccatttattaaatagggaatcctatccccattgcttgtttttgtcaggtttgtcaaagatcagatggttgtaaatatacggcattacttctgagggctctgttctgttgcattgatctatatctctgttttggtaccagtagcatgctgttttagttactgtagccttgtagtatagattgaagtcaggtagcatgatgcctccagctttgttcttttggtataggactgacttggcgatgtggactcttttttggtgtcatatgaactttaaagtagttttttccaattctgtgaagaaaatcattggtatcttgatggggatggcattgaatctataagttacttggggggcagtatggcgattttcacgatattgatgcttcctacctgtgcagttttgaaactctcttttgtagcagctgcaagtggatagttggagccctttgaggcctatggcagaaaaggaaatatcttcacacaaaaactgcacaaaagcaatgtgagaaacttctttgtgatgtgtgcattcatctcacaaaggtgaacccttcttttgattgagcagtttagaaacacgctttttgtagaatctgcaagtggatatttggaatgctttgaggcttatggtggaaaagaaaatatcttcacataaaaactacacagaagcattctgagaaacttccttgtgatgtgtgccttcaactcacagagttgaagctatcttttcatagagcagttttgaaactccccttttgtagaatctgcaagtggatatttggagccatttgcagcttatggcgtaaaaggaaatgtcttcacataaaagctacacagaggcattctgataaacttctttctgatgtgtgcattcgtctcacaaagttgaaactttcatttgattaacagttttgaaacaatattttggtagaatttgcaagtggatatttggagcgatttaagtcctattgtggaaaaggaaatatcttcacataaaaactacaaggaaatattctgagaaacttctttgtgatgtgtgcattcaacaaacacagttcaaactttcttttgattgagcagttaggaaagactctttttgtagaatctgcaagtggatctttggagcgctttgtggcctactgtggaaaaggaaatatcttcacataaaaactacccagaagcattctgagaaacaaatttatgatgtgcgcattgaactcacagagttgaacctatcttttgattgagcagttttcagtctctctttctgtagaatctgcaagtggatatttggagcccttttcagcctattttggaaaaggaaatatcttcacataaaaactacacagaagccttctgagaaacttccttggtgtgtgtgcattcacctcacagagttgaagctatcttttcatagagcagttttgaaagtcccctttcgtagaatctgcaagtggatatttggagccatttgtggcttatggtgtaaaaggaaatgtcttcacataaaagctacacagaagcattctgataaacttctttgtgatgtgtgccttcatctcacagagatgaaagtttcatttgattaacagttttgagacaatcttttggtagaatttgcaagtggatatttggagcgatttaagtcctattgtggaaaaggaaatatcttcacttaaaaactacacggaagcattctgagaaacttctttgtgatgtatgcattcatcaaacacagttcaaactttcttttgattgagcagtttggaaagactctttttgcagaatctgcaagtggatatttggagcgctttgtggcgtattgtggaaaaggaaatatcttcacataaaaactacccagaagcattctgagaaacttctttatgatgtgtgcattcaactcacagagttgaacctatcttttgattgagcagttttgaaacactctttttatagaatctgcaagtggatatttgaagcgctttgagtcctattgtggaaaaggaaatatcttcacataaaaactacatagaagcattctcagaaacgtcattgtgatgtgtgtattcatctcacagagttgaaacattcttttgattgagcagtttggaaacagactttttgtagaatctgcaagttgatatttggagcgctttcaggattattgtggaaaaggtaatatcttcacataaaaactacatagaagcattctgagaaacttctttgtgatgtgtgcattcatctcagagagttaaaccatttttttcatagagcagtttagaaacactctttttgtagaatctgcaagtggatatttggagtgctttgaggcctattgtcaaaaaggaaatatcttcacataaaaactaaacagaggcattctgagaaacttgtttgtgatgtgtacattcatctcacagagttgaacgtttcttttgattgagcagttttgaaaccctctttttgtagaatctgcaagtggatatttggagtgctttgaggccttttgtggaaaaggacatatcttcacatagaaactacgcagaagcattgtgagaaaatactttgtgatgtgtgcattcaactcccagcgttgaacctatcttttgattgagcagttttgaatctcactttttgtagaatctgcatgtaaatttttggagccctttccggcctattttggaaaagggaataagttcacataaaaactatatagaagcattttgagaaacattattaggacgtgtgcattcatctcacagagttttacctatcttttgattgagcaattttgaaccacactttgtatagaatctgcaggtggatattttaagcactttgaggccaatcgtgggaaaggaaatatcttcacataaaaactacacagaagcattctgagaaacttctttgtgatatgtgcattcatctcacagagttgaacatttcttttgattgagctgttttgaaacaccctttttgtagaatatgcaagaggatatttggagcgctttgaggccaattctggtaaaggaaataccttcacataaaaactgctaagaagcattctgtgaaacttctttttgatgtgtgcattcaattcacgcagttgaacctaccttttgattgagtagttttgaaactctctttttgtagaatctgcaagtggatattaggagcacattgaggcctattatgaaaaaggaattatcttcacacaaatctacaaagaagcattctgacaaaatactttgtgatgtgtgcattcaacacaccgagttgaaaatttcttttgattgagcagttttgaaactctctttttgcagaatctgcaagtgaatatttggagacttttgcagcgtgtgctggaaaagtaaatatcttcacataagaattactcagaagcattctgataaacatttggtgatgtgtgcattcatctaatagtgttgaacatatcttttgattgagcagctttgaaactctttttttctagaaactgcaagtggatatttggagccctttgcggcctatggtgaaaaaggaaatatcttcaaataaaaactacacagaagcgttctgagaaacatctttgtgatgtgtgcattcatctcacagatttgaatatttcttttgattgaacagttttgaaacactctttttgtagaatctgcaagtggatatttggagagcattgcggcctctagtggaaaaggaaatatcttcatataaaaactacacagaggcattctgataatcttctatgtgatgtgtacagtcatgtcacagagatgaaactttctttcgattgagcagattggaaacactctttttgtagaatctgcaagtggatgtttggagagctttgaggcctcgtggaaaaggtaatatctttacgtaaaaactacacagatgccttctgatgaacttctttttgatgtatgccttcaactcatagaactgaacttatctgttgacagagcagttttgaaaaccattttttgtagaatctgaaagtggatatttggagtcctttgtggcctatagcggaaaaggaaataccatcacataaaactccacagaagaattctgtgaaacttctttttgatgtgtgcattcgtctcatagagttgaacctttctttcaattgagcagttatgaaacaatctttttctagaatctacaagtggatatttggagcgctttgaggccaatagttttaaaggaaatatcttcacataaaaactacacagaagcattctgaggaatttctttgtgatgtgtgcattcatctcacagagttgaaacttttttttttattgagcagttttgaaacactcttttcgtagaatctacaagtggatatttggagtgctttgaggtctattgtggaaaaggaaatttcttcaaataaaagctacatggaaggagtctgagaaacttctttgtgatgtgtgcattcatgtcgcaggatgaaagctttcttttgattgagcagtttggaaatactgtttttgtagaatctgcaagtggatatttggagcttttagaggcctacggtagaaaaggaaatatcttcctataataactacatagaaacattctgagaaacttttttgtgctgcgtgcattcatctcatagagttgaacatttcttttgattgagcagtttttgaaacactgtttttatagaatctgcaagtgcacacttgtggctatttgtggtctatggtggagaaaggatatatcttcacataaaaactgcacagaagcattctgagaaagttccttgtgatgtgtgcattcatctcaccgagttgaacctatgttttgatagagcagttttgaaacactctttttgtagaatctgtaagtgcatattttgagtgctttgaggcctatggtggaaaggaaatatcttcacataaaaactacacagaagcattctcaaaacttctttgtgatgtgtgcattaaactcacagatttgaacctatcttttaatagagcagttttgaaactctcttttgtacaatctgcaagtggatatttggagacctttgcggcctatgatagaaaagggaatgtcttcacataaaaactacccagcagcattctgagaaactactttatgatgagtgcattcgtctcacagagttgaacttttccttcgattgagcagttttgaatcactctttttgtagaatttgcaagaggatatttggagcgctttgagacctattgtggaatgggaaatatcttcatgtaaaaacttcccagaagcattctgagaaacgtctttgtgatgtgtgcattcatctcacagagttgaaagtttcttttgatgagcagtttggaaacagtctttttgtaccatctgcaaatggatatttggagccctttgaggcctatgttggaaaaggaaatgtcttcacataaaaactacacagaagcattctgagaaacttctttgtgatgtgtgcattcatttcagagagttgaacttttcttttgattgagcagttttgaaactctcttcttgtagaatctgcaagtgtatatttgaagcgctttgaagcatgtattggaaaaggaaatatcttcacataaaaactagatagaatcattctgagaaacttccctgtgatatgtgcattcatctcacagtgttgaaactttcttttgattgagcagtttggaaacagtgtttttgtagtatctgtaaatggatatttcaggtgcttagaggcctatattggaaaaggaaaaatcttcacaaaaaaactagacagaggcattctgagaaacttcattctgcgatgtgcttttttctcacagagttggactgttcttttgattgagcagttttgaaacactgtttttgtagaatctgcaagtgcatatttggagcacttggaggcctattgtggaaaaggaaatattttcttataaaaactagacagaagcattctgagaaacttctttgtgatgtgtgctttcagttcacagaggtgaaactttctcttgattgagcagtttggaagtagtctttttgtagcatctgcaaatgaatatttgaatcgctttgaggcctatgttagaaaaggaaatatcttcatgtaaaatctagacagtagcattctgagaaacttctttgtgatgtgtgcattaatttcagagagttgaacttttcttttgattgagcagttttgaaacactcttcttgtataatctgcaagtgtatatttggagcgctttgagccatgtagtggaaaaggaaatgtcttcacataaaaacttgacagaatcattctgagaaacttctttgtgatgtctgcattcaactcacagtgttgaaactttctttctattgaggagtttggaaacagtctctttttagtatcttcaaatggatatttcgagtgcttagaggcctatagaggaaaaggaaaaattttcacaaaaaaactagacacaggcattctgagaaacttcattgtgaggtgtgcattcatctcacagagtttgactgttcttttgattgagctgttttgaaacaatctttttgtagaatctgcaagtgcatatttggagtgctttgcagcctatggaggaaagctaatatcttcacctggaaactagacagaagccttctgggaaacttctttgtgatgtgtgcattcacctcacagagttgaacctttcttttgattgagcagttttgaaacactctttttgtagaatctgcatttggatatttgcagtgatttgaagcctacggtggaaaaagaaatgtcctcatataaaaactagacagaagctttctgagaaacttctttgtgatgtgtgcatgcacctcagagagttgaacctttcttttgattgagcagttttgaaacactctttttgtagaatctgcaattggatatttgcagtgatttgaagcctatggtggaaaaagaaatgtcttcatataaaaactagacagaagccttctgagaaacttctttgtgaggtgtgcattcaactcacagagttgaacctttcttttgattgagcagtttggaaaccgtctttttgtagtatatgcaaattgatattttgagcactttgaggcccatggtggaaaaagaaatatcttcacataaatactagacagaagccttctgagaaacttctttgtgatgtgtgcattcatctcacagagatgaacctttcttttgatagggcagttgtgaaacactcctttgtagaatctgcaagtggatatttggagcgctttgcggcccatagtggaaaaggaaatatcttaacataaaaccagacagaagcattctgagaaacttctttgtggtgtgcctttatctcactaagttgaacatttcttttgattgagcagttttgaaacagtctttttgtagtatctgtaaattgatatttcaagcgcttcaaggcctatggtggaaaagcatatatcttcatataaatactggacagaaggattctgagaaacttctttgtgatgtttgcattcatatcatagagttgaaccttacttttcactcaacagttttgaaacactctgtttgtagaatgtgcaggtggatatttggagcgctttgcagcctatagtggcaacgaaaatatcttcacataaaaactagacagaagcattctgacaaacttctctgtgatgtgtgcattcaactcacagaattgaacctttcttttggttaagcagtttagaagcagtcgttttgtggaatctgcaaagggatatttgtgagcccattgaggcctctggggaaataggaaatatcttctcattaaaactagacagaactttctgagaaactgctttgttatgtgtgttttcacctcaaaaggttaaacctttcttttgattgagcagttttgaaacagtctttttgtagaaactgcaaatagatatttggagccctttgaagcataaggtgaaaaaggaaatatcttcccataaaaactattcagaagcattctgagaaacttctttgtgacgtgtgcattcatctcacagagttgaacattacatctgattgagcaatttggaaacagtcgttttgtggaatctgcaaagggatatttgtgagcccattgaggtccctggggaaaaaggaaatatcttcacattaaaactagacagaaactttctgagaaacttctatgagatatgtgctttcaactcacagatttgaaacattcttttgattgagcagtttggaaatagtctttttgtagattctgcaaatggacatttggatgctttgaggcctatggtgaaaaaggaaataccttcccataaaaattaggcagaagcattctgacaaacttttatttgatgtgtgcactcatctcacagagttgaaactttcttttgtttgagcagttttgaaaaaatctttttgtagaatctgcaatttcatatttggagcactttgtggcctataatgggaaaggaaatatcttcacaaaaaaactagccagaagcattctgacaaactactttggatgtgtgcattcatctgagggaggtgaatctttcttttcattgaacagttttgaaacactccttttgtagaatctgcaagcagatatttggagtgctttgagacctatggtggaaaagtaaatatcttcacataaaaagctagacagaagcattctgagaaacttcttagtgatgtgtgcattcatctcaccgagttgaaactttcttttgattgagcagtttggaaacagtctttttctagaatctgcaagtagatattcggaacgctttttgttgtatagtggaaaaggaaataacttcacataaaaactagacagaagcagtctgagaaacttctttatgatgtgtgcattcaactcacggagtttaacatttcttttcattgagcagttttgaaaaactctttttgtattatctgcaagtggatatttggagcacatttaggcctatggttgaaaaggaaatatcttcacataaaaactagacagaagcattttgagaaacttcttgatgtctgcattcatctcatagaggtgaaacatatttttggtgagcagctttgaatcactctttttatagattctgcaagtggatatttggatcagtttatgttgtgtactggaaaagggaatatcttcacgtaaaaactagacagaaacattctgagaaacttctttcttttgtgtgcattcaactcagagacttgaacctttcttttgattgagcggtttggataccatctttttagtgtctgcaaattgatatttggagtgatttgaggcctgtagtagaaaaggaaatatcttcatataaaaactagacagaagcattctgagaaacttctttgtgatgtgtgcattcatctcacagagttgaacctttcttttgattgagcagttttggatcactctttttgtacaatctgcaagtggatatttggagtgctttgaggcctatggtagaaaaggaaatatcttcacataaaaagtaggcaggaacgttctgagaaacttctttgtgatgtgtgcattcatcttacagagttgaaattttcttttggttgagcagttttgaaacacactttttgtagtatctgcaagtggatatttggggcgctttgacgcctattgtggaaaaggaaatatcttcacttaaatactacaaagaagcattctgagaaacttctttgtgatgtgtgcagtcatgtgtcaaagctgaacctttcttttgattgaccagtttggaaacagtcttttggtagtatcggcaaatggatatttggagcgctttgaggtctatggtggaaaaggaaatatcttcacataacaactaggcagaaacattctgagaaacttctttgtgatgtgtgcattcatctcagagagtttaaccattcttttgattgagcagttttgaaacactctttttgttgaatatgcaaatgaatatttggagctctatgaggcctatagcttaaaagaaaatatcttcacataaaaactacacagaagaattctgagaatcttctttgtgatgtgtgcattcatcttcatcttacagagttgaacatttcttttgattgaacagtttggaaacactctttttgtagaatctgcaagtggatatttggagcactttaagtactatgatggaaaaaatatcttcacataaaaattagacagaagcattctgaggaacttctttgtgatgtgtgcattcatctcactgcattgaatgtttcttttgattgagcagtttggaaacagtcgctgtgtggagtcttcatagggatatttgagctcactgaggcctatgggcaaataggaaatatcttcacataaaaattagatggagtctttctgagaaacttctttgtgatatgagctttcatctcacaaagttgaaactttcatttgaatgagcagtttggaaactgtcttcttgtagaaactgcaaattgatatttggagcgctttgaggccagtggtgaaaatggaaatgtcttcatttaaaaactagacagaagccttcctagaatcttctttgtgatgagtgcattcatctcacataattgaacctttcttttgattgagcagtttggaaatagtcgttttggagaatctgcaaagggatatttgtgagtccattgaggcccatgggataatgggaaatatcttcacataaaaactaggcagaaactttctgagaagctggtttgtgaggtgtgctttcatctcacagagttgaaactttcttttgagtgagcagtttagaaatagtcttttttttagaatctgcaaatggatatttgaggcactttgaggcctatgttgaataaggaactatcctcgcttaaaaactagacagaagcattctgagaaacatctttgtgatgtgtgcattcatatcatggcgttcaaccttgctttagattgatcagtttggaaacagtctttttgtagtatttgcaaagggagattttgagcgttttgaggtctatggtgaaaaaggaaatatcttcacataaaaagtagacaaaagcattctgagaaacatctttgtggtttgtgcattcatctcccagagttgaaaatttctttttattaagcagttttgaaacactctttttgtagaaaatgctactggatgtttggagtgctttgaggcctgtggcagaaaaggggtatcttcacataaaaaccagacagaagcattctcagaaacttctttgtgatgtgtgcattcatcttagagagttgaatatttcttttgattgagcagtttggaaacattcgttttgtaaaatgtgcaaagggatatttgtgagcccattgaggcttatgggaaaataggaaatgtcttcacataaaaacttgccggaaacttgttgcaaaactactttgtgatgtgtgctttcacctcaaagagttgaaactttcttttgatagagcagttttgaaatagtctttctgaagaatctgcaaatggatatttggagcgcattgaggcttatggtgaggaaggacatattttcacataaaaactcgacagaagcattctgagaaattctttgtgatgtgtgcattcatctctcagagttcaaactttcttttgatagagcagtttggaaacaatctttttatagtatctgcaaagtgatatgtggagcacttggaggcctgcattgaaaaaggaaatatcatcaaataaaaactagacaaaagcattatgagaaacttctttgtgaggtgtgcattcatctcatagagttgaactattcttttgattaaggaattttgaaacactctatttgtagaaaatggaactggatatttggagtgcgttgaggcctgtggtggaaaaggaaatatcttcacataaaaactagacagaaactttccgataaattactttgagacgtgtgctttcatctcacagagttgaaaatttcttttgattgagctgtttggaagcatacttttcatagtaactgaaaatggatatttgtagcactttgagtcatatggggaaaaatgaaatatcttcatataaaaactacactgaaccattgtgggaaacttctttctgatgtgtgcattcatttcacagagttgaacctttcttttgattgagcaccttggaaacaacctttttgtagtatcttcaaaaggatatttggagtgctttgaggcctatggtgaaaaaggaaatatcttcacaaaaaaactacagaagcattctgagaaacttctctgtgatgtgcgcatgcagctcccagagttgaatctttcttttgattgagcagttttgaaacactgtttttttagaatctgcaagtggatatttagagcgctttgaggcctgtggtggaaaaggaaatatcttcacataaaaactagacaaaaacattctgagaaacttatctgtgatgtgtgtattcatctcagagagttaaacctttcttatgattgagcagttttgaaaacagtcgttttgtagaatcttcacagggatacttgagagcccattgaggcctatggggaaataggaaatatctttgcataaaaaatagacagaaactttctgagaaactaatttgtgatgtgtgcttttatctcacacagctgaatctttcttttgattgagaagttttgaaagagtctttttgtagaatctgcaagtggaattttggagcactatgaggcctgtggtgaaaaaggaaaaatcttcatagaaaaactagacagaagcattgtgaaaaacttatttgtgatgtgtgcattcgactcacagagttgaacctttcttttgattgtgcagtttggaaacagtctttttgtacaatctgcaactggatatttggagccctttgaggcttatggggaaaaggaaaatatcttcatataaaaactagacagaagtattctgagaaacttctttgtgatgtgtgcattcatctcacagagtggaacatttcttttgattgagcagtttggaaactgtcattttgtagaaactgcaagtggatatttggagttatttgcagcctaaggtggaacaaggaatatcttcatgtgaagacgagagagaggcattcctagaaacttctttttgatgtgtgcattcatctcacagagttgaacatttcttttgattgagaagtatggaaacagtctttttgtagaatctgcaaagggatgtttgtgagtgcattgaggcctatgggcaaacatgaaatatcttcacataaaaactagaaagaaacattatgaaaaacttcttggtgatgtgtgctttcatctcacacagttgaaactttcttttcattgagcagtttttacacagtctttttgtggaatctgcaaatggatatttggagtgctttgaggcctatcatgaagaaggaaatatcttcacataaaaaccatacagaagcattctgggaaacttccttgtgtgccttcatctcagagagttaaacctttcttatgattgagcagttttggaaacagtcgttttgtagaatcttcaaagggatacttgagagcccattgaagcctatggggaaataggaaatatcctcacataaaaaaaaaaacagaaactttctgagaaactaatttgtgatgtgtgctttatctcacagagttgaacatttcttttgattgagaagtttggaaacagtctttttgtagaatctgcaaagggatgtttgtgactgcattgaggcctatgggcaaaaaggaaatatcttcacataaaaactagaaagaaacatcatgaaaaacttctttgtgatgtgtgctttcatctcacacagttgaaactttcttttcattgagcagtttttacacagtatttttgtggaatctgtaaatggatacttggagcactttgaggcctatggtgaagaaggaaatatcttcacataaaaaccagacagaagcattctgggaaacttccttgagatgtgtgccttcatctcggagagttgagactttcttttgttagaccagtttgaatatagactttttgtagaatgtgcaagtggatatttggagtgtcttgaggccaatggtggaaaaggaaatatcttcacataaaaactagatagaagcattcttagaaacttcgttgtgatgtgtgcattcttctcacagtgttgaacatttctctttattgagaactttggaaaccgtccttttgtagaatctgcaaagggatatttttgagcccattgaggcctatgaggaaataggaaatatcttcacataaaaactagtcagaaactttctgagaaacttctttgtgatgtgtgcattcatcttacagtggtgaacctttcttttgattgagcagtttggaaaccatctttttgtagtatctgcatgtgggtattttgagtgctatgtggtctatggtgaaaaagcaactatcttcaaataaaaactagacagaagcattctgagaaacttctttctgatgtgtgcattcatctcacgaaattgaacctttcttttgattgagcaattgggaaacagtctttttgtagtatctgcaagtgtatatttggaatgatttgaggcctatggtgaaaatggaaatatcttcacataaaaactacagagaaacattctgagaaacttctttgtgatgtgtgcattcatctcatagagttgaaactttcttttggttgatcagtgttgaaacactctttttgtgaatctgtaagtagatacttggagcggtttgaagcatatggttgaaaaggtagtatcttcacataaaaagtagacagaagcattctgagaaacttctttgtgacatgtgcattcatctcacagatttgaaactttcttttaattgagcagttttccaagcagtctttttgtaaaatctacacatggatatttggagcactttgaggtctatggtgaaaaagggactatcttcacattaaaactagacagaagcattctgagaaacttctttgtgaggtgtgcattaacctcacagagttgaacctttcttttgattgagcagttttggaacagtctttttgtagtatctgcaaacggatattgtgagcgatttgattcctatggtgaaaaaggaaatatcttcccataaaaactacacagaagaattgtgagacacttctttgtgatgtgtgcattcatctcacagagttcaacctttcttttcattgagaagtttggaaactgtctttttgcagaatctgcaagtggatatttggagcactttgtggccttcagtggaaaaggaaatatattcacataaaaactggatggaagcattctgagaaacttctttttaatgtgtgcattcatctcacagagttgaacatttgttttgattgaacagtttggaaagcgtcgttttgtgggatctgcaaagggatatttgtgagcccattgaggcctatgggaaaataggaaatattttcacataaaaactagacagaaactttctgagaaacttctttgtgatgtgtactttcatctcagagttgaaattttcttttttttgagcagtttggaaatgtctttttgtagagtctgcaaatggatatttggagcgctttgaggcctatggtgaaaaaggaaatatcttcacataaaaactagacagaagcattctgagaaacttctttggatgtttgcattcatctcacaggcttgaatatttcttttgattgagctgtttggagacagtctttttgtagtatctgtaaatggatattttgagtgctttgtggcctatggtgaaaaacgaaatatcttcacataaaaattagacagaagcattctgagaaacttctttgtgatgtgtgcattcatctcatggagctgaacctttcttttgattaaacagttttcaaacactctctttgtcgaatctgcaagtggatatttggagcactttgagtcctgtggtggaaaaggaaatatcttcacataaaaactaggaagaagcattctgagaaacttctttgtgatgtgtgcattcatttcacagaggtgaacatttcttttgattgagtcgtttggaaacagtcattttgtagaatctgcaaagggatatttgtgatccctttgaggcctatggggaaataggagatatcttcacataaaaactagacagaagcattctgagaaacatctttttgatgttgtgtccagaattggtgggttcttggtctcactgacttcaagaatgaagccccgtacccttatggtgagtgttacagttcttaaaggtggcgagtctggtgtttgttttttctgatgttcagatgtgttctgagtttcttccttcttgtggttttgtagactcgctagctcaggagtgaagctgcagaccttcacagtgagtgttacagctcttaaggcagtgcatctggagttttccattcctcccagtggactcgtggtctcggtcacttcaggagtgaagctgcagagcttcaccttgagtgttgcagctcataaaggcagtgtggacacaaagagagtgagcaccagcattatttattgcaaacagtgaaagaacaaagcttccacagtgtagaagggtccccaagcaggttgccactgctggctctggcagcctgctttttattctcttatctggccccacccacttcctgctgatttgtagagcccagtggactgttttgacagggcactgattggtgcatatacaatccctaagctagacacaaaggctcttcatgtccccaccagattagctagatagagtgtcaacacaaagttatccaaggccccatcagagtagctagatacacggtgtcgattggtgcattcacaaaccctgagctagacacaggatgctgattggtatgtttacacactttgagctagatacagagtgcgattggtatatttacaacccctgggctagacataaaagttctccaagtccccatgagaatagctagatacagcatgtcaattggtgcactcaaaatccctgagctagacacagggtgctgattggtgtgtttacaaaccttgatctagatacagagtgctcattatgtgagcactggaaatatatgaagatatttccattttcaccacaggtctcaaactgctctcaaatatccctctgcatattctgcaaaaaactgtgttcaaactgttcaatcaaaagaaattttcacctctgtgagatgaatgcacacatcacaaagaagttcctcagaattcttctgtctagtttttatatgaagatacttcccttttcaccataggcctcaaagcactccaaatatccatttgaagattccacaaaaagactgttaccaaactgctcaaccagaagaaaggttcaattctgtgagatgaaagcacacatcacaaaggggtttggcagaaagcttctgtctactttttatgtgaagatacttctttttcacctgaggtggcaaagagctcagaaatatcccaatgcagattgtacaaaaagacggtttccaaacagctgaaccaaaaggaagtttcaactctgcgagatgaatggacacctcacaaagaagtttctcaaaaagtgtctgtctagcttttacatgaaggtatttccttttccactatatgtctcaaactgctcacaaatattcctctgcagaatctacaaaaagtctgtttccaaactactcaatcaaaagaaagattcagctcagtgagatgaatgcaaaccccacaaagaagtttctcagaatgcttccgtctagtttttatatgaagaaatttcctcttccaccataggccccaaagcactccaaatatccattcacagattctacaaaaagactctttcaaaacttctcaatcaaaagaaagattcagctgtatgagatgaaagcacacatcacaaagaagtttctcagaatgcttctgtctattttttatgtgaagatatttcatattacaccccaggcctcaatgacatcacaattattcctttgacgattctacagaaaactgtttccaaactgctcaatgaaaagaaaggttcaactctttgagatgaatgtgcacatcacaaagcagtttctcagattacttttgtctagctttcatgtgaagatatttacattttcaacataggcttcaaaccgctcataaatatccatctccaaattctacaaaaagactgtttctaaactgctaaatcaaaagaaagtttcaactctgtgtgatgaatgcagacatcacaaagaagtttctcagaaacgttctgtctagtttttatgtgaagctatttcctatttcaacatgggcctcaaaggcctcgcaaatatccctttacagattctacaaaaagattgtttccaaactgctaaatcaaaataaaagttcaaccctgtgatatgaatgcacacatcacaaagcagtttctcagaatgcttctgtctagtttctatgtgaagatatttccattttcacaataggcacaaaactgctcacagataaccctctgcatattctgcaaaaagactgcttccaaactgctcaatgaaaagaaatattcaactctgggagataaatgcagtcatcacaaaaaagtttcaaagaaatcttctgtttagtttttatgcgaaaatattagctttttcaccataggtctcaaagaggtccaaatatacatttgcaaattccacaaaaagatggtttccaaactgctgaatcaaaagaagatctcaagtctgtgagatgaatgtacacatcacaaagaagcttctaagaatgtttctgtctagtttttatgtgaagatatttcccttttcaccacaagcctcaaagcgctccaaatatcaatttgctgatactataaaaagactgttacaaaactcctcaatcaaaacaaagtctcaagtctgtgagatgaaagcaaatatcacagagaagtttggcagaaagcttccaccaagtttttatttgaagatatttctttttcaacataggctgcaaaccactcagaaatatagctttgcagattgcacaaaaacactgtattctaacttctcaaacaaaggaaaggttcaactctgagagatgaaagctcacatcacaaagaagtttctcagaatccttctgtgttgtttttatgtgaggatatttcctatttcaccttgggcctgaaaggtttcacaaatatccctttgcagattctagaaaaagactgtctccaaactgctcaatcaaaagaaaggttcaactttgtgagatgaatgcacacatcacacagcagttttgcagaatgtctctgtctagtttttatgtgaagatatttccattttcaccgtaggcctcaaacagctgagaaatatccctctacaaatgctacaaaaacactgtttccaaactgctcaattaaacaaaaggtgcaacagtgtgaggtgaatggacaaatcacaaggaagttgctcagaaatcttccattccttttttatgtgaagatattagctttttcactttaggcctcaaagaggtccaaatatctatatgcagatacgacaaaaagacttttttcaaactgctcaatgaaaagaaaggttcaacactgtgagaagaaggcacaatcaaaaagaagtttctcagaatgattctgtgaagtttttatgtgaagatatatcctttccagctataggccccaaagaactccaaatatccatttgaagatactacagaaagagtgtttccaaactgctcaatcaaaagaaatgttcaacactgtgagtagaatgcatacatcacgaagacgtttctgagaatgcttctgtctagacttatgtgaagatatttccttttccaccgtaggcccaaaagccccccaaatatccacttgcagatactacaaaaagagtgtttctaaactgctcaagaaaaagaaaggttgaactatgtaagatgaatgtacacatcacaaaaagtttctgagaatgcttctgtctagattttatgtgaagatatttccttctccaccgtaggcctcaaaccactccaattatccgtttgcagataatacagaaagagtgtttccaaactgctcaatcaaaagaaaggttcaactctttgagttcaatgcacacatcacaaagcagtttctgagaatgcttctgtctagttttcatgtgaagatatttccttttctaccataggcctccaagagctccaaatatccacttacagattctccaaaaagagtgtttcaaactgctctatcaaaaggagggttcaactctgttagttgaatgcacacatcacaaagaagtttctgagaatgcttctgtctaatttttatgtgaagatattcccgtttccaacaaaggcttcaaagcggtccaaatatccacttgcagattctaccaaagagtgtttccaaactggtcaatcaaaagaaagtttctactctgtgaggggaatgcacacatcacaaagaagttaatgagaatgcttctgtctactttttatatgaagatattcccttttcaactataggcctcaaagcactccaaatatccatttgcagataatagaaaaaaagggtgttttcaaactactcagtcaaaagaaaggttcaactctgtgagttgaatgcacccatcacaaagaattttgtgagaatacttctgtctagttttcatgtgaagatatttccttttccaccatagccctcaaagccctccaaatatccacttgtagattctacaaaaagagtgtttccaaactactgaatctaaaggaagattcaactctgtgagatgaatgcacacatcacaaagtagtttctcagaatgcttctgtctaccctttatatgaagatatttccttttcaactacaggcctcaaagcgctccaaatatccacttgcagaaactaactgcaaaaagagtgcttctaaactgctcaatcaaaagaaaggttcaattttgcgagtttaatgcacacatcacaaagaagttactgagaatgcttctgtctagttttcatgtgtagatatttccttttccaccacaggcctcaaagcgctccaaatatgcacttgcagattctacaaaaagagtgtttaaaactgctcaatcaaaagaaatgttcaactctgtgagatgaatgcacacatcccaaaaaaatttctcagaatgcttctatctactttttatgtgaagatatttccttttcagctattggtcacaaagcattccaaatatccatttgcagatacaactaaaagattttttccaaactgctcaatcaaaagaaatgttcaaccttctgagttgaatgcacacatcacaaagaagtttctgagaatgcttctgtctagtttttatgtgaagatatttccttctccaccataggcttcaaaccactccaattatccatttacagatactacaaaaagtgtttcaaactgctcaatcaaagaaagcttcaactctttgagttgagtacacacataacaaagcagtttctgagaatgcttctgtctaattttcttgtgaagatatttccttttccaccataggcctcaaagcactccaaatatccacttgcagattctacaaaaacactgtttcgaaactgctcaatcaaaacaagtgttcaaacctctgagttgaattaaaacatcacaaagaagtttctgagaatgcttctgtctagtttttatgtgaagatatttccttttccactataggccacaaagcgctccaaatatccacttgcagaccctacaaaaagagtgtttcaaaactgctcagtcaaaagaaaggtcgaactctgtgagatgaatgtacacatcagaaagaagtttctcagaatgcttctgtctagtttttatatgaagatatttccttttcaacaatagacttcaaagggcttcaaatatccattagaagatactacaaaaaaaagagtgtttccaaacttctcaatcaaaagaaaggttcaactctgtgagttgaatacacacatcacagagaagtttctgagaatgcttctgtctaatttttatgtgaagatatttcctttttcaccataggcctcaaactgctccacctattcacttgcagattctaaaaaaagagtgtttcagaactgctcaatcaaaagaaggattcggctctgtcagatgaatgcacacatcacaaagcagtttctgagaatgcttctgtctagtttttatgtgaagatatttccttttccaccatagacatccaagggctccaaatatccaccggcagtttctacaaaaagagtgtttcaaagctgctcaataaaaagaatatttcaactctgtgagatgaatgcacacatcacaaagaagtttctgagaatgcctctgtctggttttggcatgaagatatttccttttccacaataggcctcaaagcgctccaaatatccacttgcagattctataaaaagagtgtttcaaaactgctcagtcaaaagaaagactcaacactgtgagatgaatgcacacataacaagaagtttctcagaatgcttctgtcaagtttttatgtgaagatatttccttttcaattataggcctcaaagtgatccaaatatccattggtggttactacaaaaaagaatgtttccaaacttctcaatcaaaataaatgttcaaatctgtgagttaaatgcacacatcacaaagaagtttcttagaatgattctgtctactttttatgtgaacatacttccttttccaccataggcttaaagcactaaaaatatccacttgcagattctacaaaaagagtgtttcaaaactgctcaatcaaaagaaaggttcaactctgtgaaatgaatgcagacaccacaaagtagtttctgagaatgcttcagtctagtttttatgtgaagctatttccttttccaccattggcctcaaagtgctccaaatatccacttgcagatactacaaaaaagtgtttcaaaactgctcagtcaaaagaaaggttcaactcagtgtgatgaattcaaacatcacaaagaagttaatgagaatgcgtctgtctagtttttatgtgaaggtatttccttttcagctataggcctcaaagggctccaaatatccatttgcagttacaagaaaaaaagagtgtttccaaactgctcaatcaaaagaaaggttcaactctgtgagttgaatgcacacataacaaagaagtttctcagaatccttcagtctagtttttatctgaagatatttccatttccaccatggacatcaaagtgctccaaatatccactgtcaagttctacaagaagagtgtttcaaagctgctcaataagcagaaaatttcaactctgtgagatgaatgcacacatcacaaataagtttctgagaatgcttctgtctagtttttatgtgaagatatttccttttccaccataggcctcaaaactctccaaatatccacttacagattctacaaaaagagtgtttcaaaactgctcaatcaaaagaaagactcaactctatgagatgaatgcacacacaacaaagaagtttctcagaatgcttctgtcaagtttttatgtgaagatatttccttttcaaatataggcctcaaagcaatccaaatatccattggcggatactacaaaaaagagtgtttccaaactgctcaacgaaaagaaagactcaactctgtgagttgaatccacgcaccacaaagaaggttctcagaatgcttctgtatactttttatgtgaacatatttccttttccacaataggtctcaaagcaatcaaaatatccacttgcagattctacaaaaagcatgcttcaaaactggtcaatcaaaagaaaggttcaactctgtgagatgaatgcacacatcacaaagaagtttctgagaatccttctgtctagtttttatgtgaagatatttccttttcagctatagaccccaaagtgctccaaatatccatttgcagatagtagaaaaaaagaatgtttccaaattgctcaatcaaaagaaatgttcagatctgtgagttgaatgcacgcatcacaaagaagtttctgagaatgcttctgtcttgtttttatgtgaagatatttcctttcccaccatgggcctcaaccacttgaagtatacacttgcagattctacaaaaagagtgtttcaaagctgctctatcaaaagaaaagttcaactctgtgagatgaatgcacacatcacaaagaatttaatgagaatgcttctgtcaagtttttatatgaaaatattgacttttcagctataggacacaaagcgctccaaatatccatttgcagatactagaaataaagggtgttttcaaactgctcaatcaaaagaaaagttcaactctgtgagttgaatgcacccatcaaaaagcagtttgtgagaaagcttctgtctagtttttatttgaagatatttccttttccatcataagcctcaaagtgctactaatatccacttgcagatactacaaaaagagtgtttcaaaactgctctatcaaaaggaaggttcaactgtctgcattgaatggacacatcccaaagaagtttctgagaatgcttctgtctagtttttgtgtgaagatatttccttttcagctatagaccccaaagcgctccaaatatccatttgcagatagtagaaaaaaagaatgtttccaaactgctcaatcaaaagaaatactcaaatctgtgagttgaatgcacgcatcacaaagaagtttctgacaatgcttctttcttgtttttatgtgaagatatttcctttcccaccatgggtctcaaagccctcgaaatatacacttgcagattctgcaaaagagtgtttcaaaactgcttaatcaaaagaaagactcaactctgtgagattaaggcaaacatcagagttagtttctcagaattcttctgtctagtttctatgtgaaggtatttccttttcaactataggcctcaaagcactccaaatatccatttgcagatactaactgcaaaaagagtgtttccaaaccactcaatcaaaagaaagtttcaattctgtgatttcaatgcacacatcacaaagaagtttctcagaatgcttctgtctagtttttatgtgaagatatttccttttccaccataggcctcaaagcgctacaaatatccacttgcagatcctacaaaaagagtgattcaaatctgctacatcaaaagaaaggttcaactctgtgagatgaatgcacacatcacaaagtagtttcccagaatgcttctgtctagtttttatgtgaagatatttccttttcagctataggcctcaaagcgatgcaaatattcatttgcagatactataaaagattgtttccaaactgctcaatcaaaagaaaggttgaactctttgaggtgaatgcacgcatcaaaaagaagtttctgagaatgtttctgtctagtttttatgtgaagatatttccttttccaccattggtttcaaagcgctccaaatatcctcttgtgtatcctacaaaaagagtttttcaaaactgctcaatcaaaagaaagtttcaactctgtgagatgaatgaacagatcacaaagaagtttctgagaatatttctgtctagtgttcatgtgaagaaattaccttttgagctatagtcctaaagcgctgcaaatatccatttgcagatactaaaaaaaaagatggtttccaaactgcttaatcaaaaaaagttcaactctgtgagttgaatgcacacatcacaatgaagtttctgagaatgtttctgtctagtttttatgtgaagatatttccatttccatgacaggcctcaaagtgctccaaatatccacttatagattctacaaaaagagtggttccaaactgctgtatctaaagaaagattcaactctgtgagataaattcacacatcacaaagtagtttctcagaatgcttctgtcttgcttttatgtgaaaatagttccttttcaactataggcctcaaagcgctccgaatatccatttgcagatactaactgcaaaaagagtgcttccaaaccgatcaatcaaaagaaatgttcaattctatgagttgaatgcatacatcacaaataagtttctgagaatgcttctgacgagttttcatgtgaagatatttccttttccaccataggcctccaagcactccaaatatccacttgtagattctaaaaaggagtgtttcaaaattgttcaagtaaaagaaaatttcaactctgtgagatgaatgcacacatcacaaagaagtttcttagaataattctgtctagtatttatgtgaagaaatttccttttcgactataggcctcaaagtgctccaaatatccatttgcagatgctacaaaaagagtgtttctaaactgctcaatcaaaagagacattgaactctgtgagttgaatgaacatatcacaaaaaagtttctgagaatgcttctgtctagtttttatgtgaagatatttcctttaacttcataggcctcaaagtgctccaaatatccacttgcagattagacaaaaagagtgtttcaaaaccgctcaatcaaaagaaggtttcaactctgagatgaatgcacgcttcacaaataaatttttcagaatgcttcagtctaatttttatgtgaaggaatttccttttcagctacatgcctcaaagtgctccaaatatcaatttacagatacaacaaaaagagtgtttccattctactcaatcaaaagaaagattcagctttctgagttgaatgcccacatcacaaagaagtttctcagaatacttctgactagtttttatgtgaagatattcccttttccaccataggcttctaagccatcaaaatatgcacttgcaaatactacaaaaggagtttttcaaaactgctcaataaaaagaaaggttcaactctgtgagatgaatgcacacacacatcacaaagaagtttgtcagaatgcttctgtctagtttttatgtgaagatatttccttttcagctataggactataagcgctccaaatatccatttgcagatactacaaaaacagtgtttccaaactgctaaataaaaagaaacttcaactctgttagttgaatgcacaaatcacaaggaagtttctgagaatgcttctgtctagtttttatgtgaagatatttacctttccaccatatgcctgaaagtgctccaaatatctccttgcagattctacaaaaagagtgtttcaaatctgctctctgagaagaaaggttcaactatgtgagatgaatgcacacatcacaagtaagtttctcagaatgcatctgtccactttttatgtgaagatatttctttttcaactataggtctcaatgctctccaaatagccacttgcagattctccaaaaacagtgttgaaaactgctcaatcaaaagaaatgttcccatctgtgagatgaacccatacatcacaaataagtttctcagaatgcttgtgtctagttttactgtgaagatatttccttttccaccatagacctcaaagcgctccaaatatccacttgcaaattctacaaaaagagggtttcaaaactgctcaatcaaaaagcaagtttcaactctgtgagatgaaagcacacattacaaagaagtttctgagaatccttctgtctactttttgtgtgaagatattaccttttccaccataggcataacagtgctccaaatatccctttacatatactacaaaaaaagtgtttccaaactgctcaaacaaaagaaacgttcaactctgtgagttgaatgcacacatcacaatgaagtttctgagaatgtttctgtctagtttttatgtgaagatatttccatttccatgataggcctcaaagtgctccaaatatccacttatagattctacaaaaagagtggttccaaactgctgtatctaaagaaagattcaactctgtgagataaattcacacatcacaaagtagtttctcagaatgcttctgtcttgcttttatgtgaaaatagttccttttcaactataggcctcaaagcactccaaatatccacttgcagattctacaaaaagagtgtttcaaaactattcaatcaaaaaaaaggttcaactctgtcagttgaatggacacatcacaaagaagtttctcagaatgctactgtctactttttatgtgaagatatttctttttcaactataggcctcatagcactccaaatacccatttgcagatactacaaaaggagtgtttccaaactgctcaattaaaacacaggttgaactctgtgacttgaatgcacacatcagaaagaagtttctgagaatgcttctgtctgctttttatgtgaagatatttcattttgcaccatacgcctaaaatctctccaaatatccgattgcagattctacaaaagagtgtttcaaaactgctcaatcaaaagaaaggttcaacagtatcagacgaatgcacaaatcacaaagaagtttctgagaatgcttgtgtctagtttttatgtgaaggtatttccttttcaaccacatgcctcaaagcactacaaataccatttgaagatactattaaaagagtgtttccaaactactcaatccaaagaatcatttaattctgtgaaataaatgcatcatcacaaagaagtttctcagaatgcttcagtctagtttttatctgaggatatttccttttcagctttaggcctcaaagcactacaagtatccacttgcagatgctacagaaagggtgtttccaaacttctcaatcaaaagaaatgttcatctctgtgagttgaatgcacacatcacaaagaactttctgagaatgcttctgtctagtttttatgtgaagatatttccttttcactgtaggctcaaaatcgtccaaatatccatttgcaggtactacaaaaagactgtttccaaaatgctcaatcaaaagaaagtttcaaatctgtggcttgaatgcacatatcagaaagaagtttctgagaatatttctgtctagtttttatgtgaagatatttccttttccaccataggcctcaaagtgctccaaatatccacttgcagtttctacaaaaagtgtgttggaaaactgctcaatgaatagaaactttcaactctgtgagatcaatgcacacatcacaaagaagctattcagaatgctcttgtctattgtttaagtgaagatatttctttttgagatatagacctcaaattgatccaaatatccatttgcagattctacaaaaaaagtgtttccaaactgctcaatcaaaagaaaagttcatttctgtgagtaaaatgcacacatcacaaagaagtttctcagaatgctcctgtctaccttttaagtgaagatatttcttttcgagttatagacctcaaagtgatacaaatatccatttgcagattctacaaaaacagtgtttccaagctgctcaatcaaaagaaaggttcaattctgtgagtaaaatgtacacatcacaaagaagtttctgagaatgcttctgtctagtttttatgtgaagatatttccttttccaccatagacctcaaagcgcaccaaatatccacttgcagattctacaaaaagagtatttcgaaactactcaatgaaaaaaaaggttcaactctgtgagatgaattcataaatcacacagaaatttctcagaatgcttctgtctagtttttatgtgaagatattaccttttcagctataggcttcaaaaagtacaaaatatgtgtttgcggatactacaatacgagtgtttccaaactgctcaataaagcaaaggtccaactctgtgagttgaatgcacacatcactaagaagttgctgagaattcttctgtctagttttgatgtgaacatatttccttatccaccataggcctcaaagtgctcccaatatccacttgcagattctacaaagagagtgtttcaaaactgctcaacgaaaataaagtttcaactctgtgagatgaatgcacacaatacacagaacttcctcagcatgcttctgtctagtttttatgtggcgatatttgcttttcagctttaggcgtcaaagcgctccaaatatccacttgcagattctccaaaaacagtctttcaaaactgctcagtcaaaagaaaagttcaattctgtgagatgaatgcacacataacagagaagtttctcagaaagcttctgtctagtttttatgtgaagacatttccttttcaacaacaggcctcaaagcactccaaatatccatttgcagatactacaaaaagagtgttcccaaactgcttaatcaaaagaaaatttcaactctgtgaaatgaatgcacacatcaaaaagtagtttctgcaaatgcttctgtctagtttttatgtgaagatatttccttttccaccataagcctcaaagcgctccaaatatccacttgcagattccgcaaaaagagtgtttcaaaactgcttaatcaaacgacagattcaacttgtgagatgaatgcacacatcacaaataagtttctcagaatgcttctgtctagattttttgtgaagacatttccttttcaactataggcctcaaatggctaccaatatccatttgcagatacttcaaaaagagggtttctaagctgctcaatcaaaagaaagtttcaactgtgtgagttgaatgcataaatcacaaagaagtttctgagaatgcttctgtccagtatttatatgaagatatttgcttttctgccaatggcctcaaagcactccaaatatccacttgcagattccacaaaaagagtgcttcaaaactgctcaattaactgaaaggttcaattctgtgaattgaacgcacacatcacaaaggtgtttctgagaatgcttctgtctagtttttatgtgaagatatttccttttccaccatagtactcacagcgctccaaatatccagttggagatgctacaaaagattgtttcaaaactgcttaatcaaaagaaaggttcaactctgtgagatgaatgcacacatcagaaagaagtttctcacaatgcttttgtctagtttttatgccaagatatttccttttcagctgcaggcctcaaagcgctccaaatatccattgtcagatactaccaaaagagtgtttccaaactgctatatcaaaagaaaagtttaactctttgagttgaatgcacacatcacaaagaattttctgagaatgcgtctgtgtggtttttatgtgaagatatttccttttccactgcaaacctcaaagcactctcaatatccatttgctgattctacaaaaagagagtttcaaaactgctcaatcaaaagaaagattcaactctgtgagttgaatgcacacatcacaaagaagtttctcagaattcttcagtctactttttatgtgaaaatatttccttttcaactgtaggcttcaaagcgctccaaatatccatttgcagatactacaaaatgggtgtttccaaactcctcaatcaaaagaaatgttcaactctttgagatgaatacacgtatcacaaagaagtttctcagaatgcttctgtctagtttttatgtggagatatttccttttcagccgtaggcctgaaagcgttccaaatatccatttgcagacactacaaaaagagtgtttctaaactgttcagtcaagagaaaggtttaactctgtgagttgaatgcacacatcacaaagaagtttctgagagtgtttcctctagtttttatgtgaagatatttccttttccaatgtatgcctcaaagcactccaaatgtccacgtgcagaatccacaaaaagactgtttcaaaactgcttgatcagaaaaaaggttcaactccatgagatgaatgcacacatcacaaagaagtttctcagaatgcttctgtcttgtttttatatgaagatatttccttttcagctataggattcaaagtgctccaaatatccacttgcagatactaaaaaaagagtgtttcccaactgctcaataaaagaaaggttcaacactgtgagttgaatgcacacatcaaaacgaagtttctgagaatggttctgtcttgtttttatgtgaagatatttccttttccccctaggccaaaaagtgctccaaatatccacttgcagattctacaaaaagagtgtttcaaaactgctcaatcaaaagaagggttcaactctgtgagatgaatgcacacaacacaaataactttctcagaatgcttctgtctagttttatgtgaagatatttccttttcaactacaggcctgaaagcactgcaaatatccacttgcagatactacaaaaagagtgattccaaactgctcaatcaaaagaaagtttcaactctgtgagttgaatgcacacatcacaaagaagattctgagaatgcttctgtctggtttttctgtgaagatatttccttttaaaccatatgcctggaattgctccaaatatccaacttcagattctacaaaaagaatgtttcaaaactgctcaatgaaaagaaaggttgaacgctgtgagttcaatacacacatcaaaaaagtttctcaaaatgcttctgtctagtttttatgtgaagatatttccatttccaccattggcctcaaagcgcttcaagtgtcccattgcagattcttcaaaaagtgtgtttgaaaactgctcaatcaaaagacaagttcaaatccatgagatgaacgcacacatcacaaagaagtttctcagaatgcttctgtcttgtttttatatgaagatattttcttttcagctataggcttcaaagcgctccaaatatccaattgcagatactaaaaaaagagtgtttccaaactgctcaataaaagaaaggttcaacactgtgagttgaacgcatatatcacaaagaagtttcccagaatgtttctgtctagtttttatgtgaagatatttccttttccaccataaacctcaaagcactctcaatatccctttgacgattctacaaaaagagtgtttcaaaactgcttaataaaaagaaaggttcaactctgtgagatgaatgcacacatcacacagaagtttctcagcaggcttctgtctagtttttatgtgaagatatatccttttcaaccataggcctcaaagcactccaaatatccacttgcagattctacaaaaacagtgtttcaaaactgctcagtcaaaagaaatgttcaaaaatgtgagatgaatgcacacatcacaaaaaagtttctcagaatgcctctgtctactttttatgtgaagatacttccctttccactataggcctcgaattgccacaaatatcaactttgaaattctacaaaaagaatgtttcaaaaccgctctatcaaaagaaaggttcagtgctgtgagttgaatgcacacagcacaaagcagtttctcagaatgcttctgtctagtttttatgtgaagatatgtgcttttcctccatagtcctcaaaggctccaaatatccacttgtagattctacaaaagcagtgtttaaaaactggtcaattaaaagaaagtttcaactctgtcagatgaatgcacacatcacaaacaagtttttgagaatgctcctgtctattttttatatgaagatatttccttttccaccataggacctacagcactccaaatatccaattccagattctacaaaacagtgtttcagaactgcacaatcaaaagaaagttacagctctttgaggtgaatgcacacatcacaaagatgtttctcagaatgcttctgtccagtttttaagtgaagatttttccttttccactgtaggcagcaaagttctccaagtatccacttgtagattcgacaaaaagagtgtttcaaaagtgctcagtcaaaagaaatattcaacactgtgatgtgaatgcacacattgcaaagaagtttctcataatgcttctgtatagtttttatgggaagatatttccttttccaccataggcttcaaagcgctctaaatatccactggcaggcactacaaaaagagtgtttcaaaattgctcaattaaaagaaaggttgaaccctgtgagatgaatacacaaaccacaaagatgtttcccagaatgcttctgtgtagtttttatgtgaagatatttccttttccactataggccacaaagcattccaaatatccacttgcagatactacaaaaagtttgtttccaaactgctcaatcaaaagaaagtttcaactgtgtgacatgaatgcagacatcaaaaagaagtttctctgaatgctttgttctagtttttatgtgaagatatttccttttccactatagacctcaaagcactccaaatatccatttgcagatactccaaaaagactgtttccaaattgctcaattaaaagaaagtttcaactctatgagttgaatgcacacatctcaaagaagtttctcagaatgcttttgtctggtttttatgtgaagatattcccttttccactgtagacctcaaagccttccaattatcctcttgtagattttacaaaaagagtgtttcaaaactgctcaatcaaaagaaaggttcaactctgtgagatgaatgcacacattgcacagaagtttctcagaatgtttctgtctagtttttatgtgaagatatttccttttccaccacaggacccaaagcactacaaatattcacttgcagatactacaaaaggactgttccaaactgctcaatcaaaagaaaggttcagctctgtgaattgaatacacacagcacaaagaagtttctcagaatgtatctgtcaattttttatgtgaagatatacccttttccaccataggttcaaagcactccaaatacccactggcagatactacaaaaagattgtttcaaagctattccatcaaaagaaaagttcaactacgtgagaagaacacacacatcacaaagagttttctgagaatgcctctgtctggtgtttgtgagaagatatttccttttccaccatatgctgcaaagctattcatatatcccattgcagaaagtacaaaaagactgttttcaacctgctcaatcaatagaaaagttcaatcctgtgagttgaatacagaaatgcaaggaagtttctctgaatgcttctgtctagtttttatgtgaagatatttccatttccacgataggactcaaagcgctccaaatatccatttgcagataccacaaaaagacggtttccaaactgctcaatcaaaagaaatattcaactctgtgagatgaatgcacacatcacaaaggagtttctcagaatgcttctgtcaagtttttatgtgaagatatttccttttcaaccataggcgttaaaagtgttccaaatatccacttggagatactacaaaaagactgtttccaaactgctcaatcaaaagaaaagttcacatctctgagttgattacacacatcacaaagaagtttctcagtatgattctgtctagattttaagtgaagatatttccttttccaccataggcctgaaagcactccaaatatccacttgcagattctacaaaaagagtgtttccaaactgttcaataaacagaagggttcaactctgtgagatgaattcacacaacacatagaattttctcagaatgtttctggctagtttttatgtgaagatatttccattttcactataggactcaaagtgctccaaatatccatttgcagatactacaaaaagacagtttccaaactgctcaatcaaaagaaatattcaactctgtgagatgaatgcacacatcacaaaggagtttctctatatgcttctgtctagtttttatgtgaagacattttcttttccaatataggcttcaaagcgctctaaatatccgcttgcagattctacaaaaagagtgtttccaaactgtttaatcaaaagaaaggtccaactcagtgagatgaatgaacacaacacaaaaactttgtcagaatgcttctgtctagtttttacttgaagatatttcctttttcaccttaggcctcaatgtgttccgaatctccttctgcacatactaaaaaatactgtttccaaacttctcaatgaaaagaaaggttcaactcttttagatgaatgcacacatcacagcgaagtttctcagaatgcttctgtcttgtttttatgtgaagatatttccttttccacaatagcccacaaagcactccgaatatgaacttgcggattctgcaaaaaaagtgtttccaaacttatgaatcaaaagaaagtttcaactctgtgtaaggaatgcacacaacacaaagaaattagtcagaaaatttctgccaagtttttatgtgaagatattacctatttccccagaggcctcaatgggctcaaaaatattccttcagagattctacaaaacaactgtttccaaactgctcaatcaaaaaaaaagtttcaaccatgtgacatgaatgctctcatcgcaaggaactttctcagaatgcttctgtctagttttcatgtgaagatatttttttttcaccacaggcatcaaagcgctccaaatatcaatttgcagacacttcaaaagtactgtgtccatactgctcaatcaaaaggaaagtttagctctgtgagatgaatgaacacgtcacaaagaaatttctccaaatgcttccatccagtttttatgtaaagatattttcttttccactataccccacaaagcgctattaaaatacacctgcagtttctatcaaaaggctgtttccaaactgcacaatcaaatgaatggttcaactctgtgagatggattcacacatcacaaagacatttctcagaatgtttctgtctagtgtttatatgaagaaattcccttttccaccatgggcctcaaagcgctccaaatatccactttcagattgtacaaaaagagtgtttcaaaactcctcaatcaaaagaaaggttcaactctgtgagatgaatacacccatcacaaagaagtttctttgaatccctctgtctagtttttatgtgaagatatttccttttccactatgggcctcaaatcacaccaaatatcaatttgcagatactacaaaaagagtgtttacaaactgctcaatgaaaagaaaggtttaactgtgaaatgaatgcgcacattacaaagaagtttctcagaattcttctgtctagtttttatgtgaagatatttccttttccactataggccacagagcactctaaatacccactttcagattctacaaaaagagtgtttcaaaactgctcaatcaaaagaaaggctaaattctgtgacatgaatgcacacatcacaaagaggtttctgagaatgcttctgtctagtttttatgtgaagatatttccttttccactataggcctcaaagcactccaagtatccacttgcagatactacaagaagactgtttccaaactgctcaatgaaaagaatttttcaactctgtgagatgaaagcacacaacacacataagtttcccaaacgtttcactctagattttatctgaagagatttcctattttcccagaggcctcaatgggctcacacatatctctttccagaatctacaaaatgactctctccaaagtgctcaataaaaagaaagattcacctctgtggggtgaatgcacacatcacaaagacgtttctcagaatacttctgtctagtttttatgtgaagatatttcctatttcctgagaggtctcaatgggctcacaaatatcccattgcagattctacaaaacgactgctttcaaaatgctaaatcaaaagaaagttttaactctgtgagttgaatgcactcatcacaaagaagtttctcagaatgcttctttctagtttttatatgaagatattcccttttccacaaaaggtctcaattgagctccaaatatccacttgcagatactacaaaaagactgtttccaaactgctcaatcaaaacaaatgttcaactctgtgagatgaatgcgcacattacaaagaagtttctcagaatgtttctgtctagtttttatgtgaagatgtttcctttttcaccataggcctccaagcgttccaattatccacttgcagattccacaaaaagggtgttccaaaactgctcaatcaaaagaaagtttcaactctgagagatgaatgaacacatcacagagaaatttctgagaatgcttctgtctagtttctatgtgaagatatttatttttccacaataggcctcaaagctctccaaatatccacctgcagattctagaaaaagagtgtttcacaactgctcaatcaatagaaagtttcaactctgtgagatgcatgcacacatcacaaaagtttctcagaatgcttctctctagtttttatgtgaaggtatttccttttccatcatagtcctcaatgtgctccaaacatccactagcagattctacaaaaagaatgtttccaaacttttcaatcaaaagacaggttcaactctgtgagatgaatgtgcacatcacaagcaaggttctcagaatgcttctgtctcgtttttatgtgaagatattttcttttcctcagtaggccacaaagtgctccaaaaatacactagaagattccagagaaagagtgtttcaaaactgctcaatgaaacgaaatgttcaactctgtgagatgaatgcacacatcaccaagaagtttctcagaaagtttctgtctagtttttatgtgaagaagtttcctatttccccataggcttcaaaggactcacaaatttccctttgcagtttatagaaaacgaatgtttccacactggccaataaaaagaaatgtgcaactctgtcagatgaatgcacccatcacagagaagtttctcagaattcttctgtctagtttttatgtgaagatatttcatttttcaccagagttctcaaagagctccaaatatccatttgcagattctacaaaaggtctgtttccaaactacccaatcaaaggaaagtttcaactctgtgagatgaaagcacacatcagaaagaagtttccagaaagtttctgtctagttttcgtgtgacgatatttcctatttctccataggcctcaatggtctcacaaatatccctttggagattctacaaaaccactgtttccaaactgctcaatcaaaagaaatgttcaactctgtgaaatgaatgcacacatcacaaataagttgcagagaatgtttctatctagttttcatgtgaatatatttccttttccaccataggcttctaggtgccccaaatatccacttgcagattctacaaaaagagtgtttcaaaactgctcaatcaaaagaaaggttcaactgtgtgagctgaatgcacatatcacaaagaagtttctgagaatgcttctgtctagtttgtatgtgaagatatttccttttccatcttaggcctcaaagtgctccaaatatacattttcagattctacacaaagagtgtttcaaaactgctcaatcaaagaaacattcaactctgtgagatgaaagcagacatcacaaacaagtttctcagaatgcttctgtctactttttatgtgaagatatttccatttcaccataggcctcaaagcgctccaaatatccactggcatattctacaaaaagattgtttcaaaactgctcattcaaagaaaggttcaactctgtcagatgaatgcaaacatcacaaagaagtttctcggaatgtttctttctagtttttatgtgaagatgtttcctatttccccataggccacaatgggctcacaaatatccatttgcagattctacaaaatgcagttttccaaactgttcaatcaaaagaaatgttcccatctgtgagatgaacgcatacatcacaagtaagtttctcagaatgcttgtgtctagtttttatgtgaagatatttccatttgcaccataggcctcaaagtgcaccaaatatccatttgcagatactacaaaaagaccgttttataactgctcaatccaaagagaggttcaactctgtgagatgaatgcacacatcacaaagaagtttctcagaatgcttctgtctaatatttatgtgaaggtatttcctttatcaccataagccccaaggccctccacatatccctttgcagatcctacaaaaagactgattccaagctgctcaatcaaaagaaagtttcaactctgtgacatgaaagcaaacagcacaaagggttttctcagaaagcttctgtctggttttcatgtgaagatatttccaatttctccacaggcctctaagcgctccaaatatgcacttgcacattctgcaaaaagagtgtttcaaaactgctcaatcaaaagaaagtttcaactctgtgaggtgaatgcacacatcacaaagaagtttctcagaaggtttctgtctactttttatgtgaagatgtttcttatttccccttaggccacaattggatcacaaatatccctcggcagatattataaaaggaaggtttccaaactgctcaatcaaaagaaatgttcccatctgtgagatgaacccatacatcacaaataagtttctcagaatgcttgtgtctagttttactgtgaagatatttccatttgcaccataggcctcaaagcactccaaatatccatttgcagatactacaaaaaggctgttttccaactgctcaataaaaagagaggttcaactctgtgagatgagttcacacatcacaaagaagtttctcaaagtgctactgtctagcttttatatgaagatatttccttttttcaccataggccccaaagtgctccaaatatccatttgcagattctacaaaaatactgcttccaaactgctcaatcaaaagaaatcttcaactctgtgagattaatgcaaacaacacaaagaagtttctcagaatgcttctgtctagtttctatgtgaagctatatccttttccaccatagggcccaaagtgttccaaatatccaattgtagattctacaaagagaatgtttcaaaactgctcaatcaaaagaaagtttcaactctgggagatgaattcatacatcacaaagaagtttctcaggatgcttctgtccattttttagatgaagatatttcctttttcaccatagggctcaaagtgctacaaatatccatttgcagatacttaaaaagactgtttccaaactgctcaatctaaagaaaggttgaactctgttagatgaaagcacacatcacatagaagcttctcaggaactttctgtctagtttttatgtgaagatatttccaatttccccataggcttcaatgggctcccaataatccttttgcagattctacaaaacgactgtttcccaactgctgaatcaaaagaaaggttcaactctgtgagatgaatgcacacatcacaaagaagtctctcagaatgattttctctagtttttatgtgaatatacttcctttttcaccataggactcaaagtgctccaaatatccattcgtagtatctacaaaaagtctgtttccaaactgcactaacaaaacaaagtttcaattctgtgagatgaaaacacacatcacaaagtagtttctcagaatgcttctgtctagttttcatgtggagatatttcctactaccccataggcctcaataggctcacaaatatccctttacagactctacaaaacgactgtttaaaagctgctcaatcaaaaaaaatgttcaactctgtgagatgaatgcacacatcacaaataagtttctcaggatggttctctctactttttgtgtgaagatatttccttttccaacataggcctcaaagcactccaaagatcttcttgcagatttttcaataagagtgtttcaaaactgactttcttcacagaattggaaaaaaactactttaaagttcatatggaaccaaaaaagtgcccgcatcaccaagtcaatcctaggccaaaagaacaaagctggaggcatcacgctccctgacttcatactatactacaaggctacagtaaccaaaacagcatggtactggtaccaaaacagagatatagatcaatggaacaaaacagagccctcagaaataacgtcaaatatctacaactatctgatttttgacaaacctgagaaaaacaagcaatggggaaaggattccatatttaataaatggtgctgggaaaactggctaaccatatgtagaaagctgaaactgaatctcttccttacaccttatacaaaaattaattcaagatggattacagacttaaacgttagacctaaaaccataaaaaccctagcagaaaacctaggcattaccattcaggacataggcttgggcatggacttcatgtctaaaacaccaaaagcaatgacaacaaaagacaaaattgacaaatgggatctaattaaactaaagagcttctgcacagcataagaaactaccatcagactgaacaggcaacctacaaaatgggagaaaatttttgcaacctactcatctgacaaagggctaatatccagaatctacaatgaactccaacaaatttacaagaaaaaaacaaacaaccccatcaaaaagtgggcaaaggacatgaacagacacttctcaaaagaagacatttatgcagccaaaaaacacatgaaaaaatgctcaccatccctggccatcagagaagtccaaatcaaaaccacaatgggataccatctcaaaccagttagaatggcaatcattaaaaagtcaggaaacaacaggtgctggagaggatgtggagaaataggaacacttttacactgttggtgggactgtaaactagttcaaccattgtggaagtcagtgtggtgattcctcagggatctagaactagaaataccatttgacacaaccatcccattactgggtatatacccaaaggattataaatcatgctgctataaagacacatgcacacgtatgtttattgtggcactattcacagtggcaaagtcttggaaccagcccaaatgtccaacaagaatagactggattaagaaaatgtggcacatatacaccatggaatactatgcagccataaaaaatgatgagttcatgtcctttgtagagacatggatgaaattggaaatcatcattctcagtaaactatcacaaggacaaaaaaacaaacaccgcatattctcactcataggtgggaattgaacaatgagaacacatggacacaagaaggggaacatcacactctggggactgtggtgtggtggggggaggggggagagatagcattaggagatatacctaatgctaaatgaggagttaattggtgcagcacaccagcatggcacatgtatacatatgtgactaacctgcacattgcacgcatggagcttaaagcttaaaatataataataataaatttaaaaaaaataaataatagatttttttaatctgtaaaataaataaataaataaataaaaataaataaaaaattgctaaatcaaaagaaaggttcaactctgtgagatgaattcacacatcacaaagaagtttctcagaatgcttctgtctagtttttgtgtgaagatgtttcctttttcaccataggcctcaaagcactccaaatatccatcagcagatactacaaaaagactgtttccaaactgctgaatcaaaagaaaggttcaactacgtgagatgaatgcacacatcacaaagaagtttctcagaatgcttccgtctagtttttatgtgaagataattcctttttcaccatagggttcaaaacgctccaaatacccactggcagattctacaaaagagtgtttccaaactgctcaatcaaaagaaaggttcaattctgtgagatgaatgcacacatcacaaagaagtttctcagaatgcttctgcctagtttttatatgatgatatttccttcttcaccatatgccgcaacatgctcaaaatatccatttgcagattctacaaaaagactgtttccatactgctcaatcagaagaaagcttcaactctataagatgaaagcatgcatcacaaagaagtttctcagaatggttctctctagtttttatgtgaagatatttcctatttccccttaggcctcaatgggctcaaaaatatccctttgcagattctacaaaacagctgtttccaaactgctcaatcaaaagaaaggttcaactctgtgagatgaatgcacacatcacaaacgagtttctaggtatgtttctgtctagtttttatgtgaagatatttcctttttcaccataggcctcaaagcgatccaaatatccatttgcagattctataaaaagaccttttacaaactgctcaatcaaaagaaaatttcaactctgtgacatgaaagcacacatcatgaagaagtttctcagaaagattttgtctggtttttatgtgaagatgtttccatttccccatagtcctcaaagggctcacaaatatccctttgcagattctacaaaacagctgtttccaaactgctcaatcaaaagaaaggttcaactctgtgagatgaatgcacacatcacaaacgagtttctaggtatgtttctgtctagtttttatgtgaagatatttcctttttcaccataggcctcaaagcgatccaaatatccatttgcagattctataaaaagaccttttacaaactgctcaatcaaaagaaaatttcaactctgtgacatgaaagcacacatcatgaagaagtttctcagaaagattttgtctggtttttatgtgaagatgtttccatttccccatagtcctcaaagggctcacaaatatccctttgcagattctacaaaacagctgtttccaaactgctcaatcaaaagaaaggttcatctctgtgagatgaatgcacacatcacaaatgagtttctaggtatgtttctgtctagtttttatgtgaagatatttcctttttcaccataggcctcaaagcgatccaaatatccatttgcagattctataaaaagaccttttacaaactgctcaatcaaaagaaaatttcaactctgtgacatgaaagcacacatcatgaagaagtttctcagaaagattttgtctggtttttatgtgaagatgtttccatttccccatagtcctcaaagggctcacaaatatccctttgcagattctacaaaacgactgtttcaaaactgctcaatcaaaagaaatgttcaactctctgagatgaatgcacacatcacaaagcaatttctcagaatgcttctgtctattttgtatgtgaagatatttccttttccaccataggcctcaaagcactccaaatatctgcttgcagatactacaaaaagagtgtttccaaactgttcaatcaaaagaaaggttcaactctgtgagatgaatgcacacatccaaagaactttctcagagtgtttctgtctagtatttattttaagatatggcctttttcaccataggccacagagtgctctaaatatccatttgcagatcctacaaaaagactgtttccaaagtgctcaatcaaaagaaaatttccacttggtgagatgaaagcccgtatcacaaagtagtttttcagaaagtttctgtctagtttttatgtagaatctgcagagggatatttgtgagtggtttgaggcctgtggtgaaaaaggacatatcctcacataaaaactagacagaagcattttgagaaactttttcatggtgtgtgcattcatctaaccgagttgaacctttcttttgattgagcagattggaaagtctttttgtagaatctgcagagctacatatgtgagtcatttgaggcctatggtgaaaaaggaaataatttcacacaaaaactacacagaatctttctgagaaacttatttttgatgtgtgctttcatctcacagagttgaacctcttttttgactgagcagtttggaaacagtgtttttgcagaatctgcaaatggatatatggtgtgctttgaggcccatggtggaaaaggaaatatcttcaaataaaaaatagacagaaactttctgagaatctcctttgtgatctgtgctttcacatcactgagttgaaacattcttttcatggaggagttttgaaacagtctttttgaagaatctgcaaagggatatttgtgaccagtttgaggcctatggtgaaaaaggaaatatcttcacacaaaaactaggcagaagtttttgagaaacttctttgtgatgcttgcattgacctcacagagttgaacctttcttttcattgagcagtttggaaacagtctttttgaagaatgtgcagagggatacttgtttagccgttttaggcctatggtgaaaaaggaaatatcttcccagaaaaactagacaaaagatttttgagaaacttctttgtgacttgtgcattcatctcacagatttgaagctttctgttgattgagcagtttggaaagagtctttttgtagaatctgtaaagggatatttttgagaccattgaggcctatggtgaaataggaaacatctttacataaaaacaagacagaagctttctgagaaacttctttttgttgggtgctttcatctcacagagttgaacctttctttttattgagcagtttggatatagtctttttatagaatctgaaaatggatatttggagtgctttgaggcctatggtgaaaaaggaaatgtcttcacataaaaactagagagaaacattctgagaaacttctttgtgatgtgtgcttacatttcacagatttgaacctttcttttcattgagcagtttggaaataatctttttgtagaatctgcaaatggatatttgtgagcggtttgaggcataccgtgaaagaggaaatatcttcacataaaaactggagagtagcttttgagaaacttctgagtgatgtttgtattcatctcacagaattgaacttgtcttttcattgagcagtttggaaacagtctttctgtacaatctgcaaagggatgtttctgagagttttgaagcctatggtgaaaaagaactattttcatgtaaaaattagaccgaagatttcagagaaatttcattttgatgtgtgctttcatctcacagagttcagcatttcttttgattgagctgtttggaaagtctttttgtagaatctgcaaatggatatttggtgtgctttgacgcctatggtgaaaaaggaaatatcttcacataaaaactagacagaagatctctgagtaacttatttgtaatgtgtccattcatctcacagacttgaaactttcttttgattgagcagtttagaaaccgtctttttgtagattatgcagcagaatagttgtgagaggattgatgcctattgtgtaaaaggaaatatcttcacataaaaactagaaagaaactttctgagaaacttctttgtgatgtgtgcattcatctcagagggttgagcgtttcttttgattgagcactttggaaacagtctgtttctacaatctgcaaagggatatttctgagtggtttgaggcctatggtgaaaaagaagtatcctcatataaaaactagatagcagcattctcagaaactactatgtgatgtgtgcattcatctcacagtgttgaaaatttattttgattgagcagtttgcaaacagcttttttgtggactctgcaaagggatatttgttagcccattgaggactatggtgaaataggaaatatcttcacctaaaaactagacagaatctttttaagaaacttccttgtgatgagtgctttcatctcatcgaattgaacatttttttcattgagcagtttggaaacagtctttttgtagtatctgcaaagggatatttgtgagtggttgaggcctatggtgaaaaaggaaatatcttcacgtaaaaactagatagaagctttttgagaaacttctttgtgatgtttgcattcatctcacagaattgaacctgtcttttcatagagcagtttggaaacactctttttgtacaatctcaaatagatatttctgcacgtcttgaggcctatggtgaaaaagaaatatcttcacaaaaactagacagaaactttcagagaaacttcactgtgatgtgtgctttattatcacacagacgaacctttcttttgattgagcagtttggaaacagtctttttgaagtttatgcagagagatatttgtgagcagtttgatgtctatggtgtaaaaggaaatatcttcacataaaaattagacagaagttttctgataaacttctttgtgatgtgtgcattcatatcacagaggtgaacctttgttttgattgagcagtttggaaacaatctttttctacactctgcaaagggatatttctgagcaatttgaggcctatggtgaaaaagaagtattatcacataaaaactagaaagaagcattctgagaaacttttttgtgatgtgtgcattcatcgaacagagttgaaaatttcttttgattgagcagttttgaaacggtgtttttgtggaatctgcaaagggatatttgttagcccattcaggcctacagtgaaataggaaatattttcacataaaaacttgacagaaaatttctgagaaacttccttgtaatgtgtgatgtcatctaacatagttaaacctttcttttgattgatcactttggaaacagtctttttgtagaatctgcaaatggatatttggagtgctttgaggcctatagtgaaaacggaagcatattcacataaaaactagacagaagctttgtgagaaaattttctgtgatgggtgcattcacctcacagagttgaacgtttgttttgaatgagcagtttggaaacagtctgtttgtagaatcggcaaattgatatttttgagccatttgaggtatatggtgaaaaaggaaacaacttcacataaaaactagacagaagttttctgagaaacttctttgtgatgtgtgcattaatctcaccatgttcaacctttcttttgagtgagcagtttggaaacaatctttttatagactctgcaaaggtatatttgtgagcccattgaggcctatggtgtaacaggaaatatcttcacataaaaactagagagaagcattctgagaaaccactttgtgatgtgtcctttcatcacacagagttgaacctttccgttgattgagcagtttggaaacagtctttttgtagaatctgcaaatggatatttggagaactttgaggtctacggtgaaaagggaaacatcttcacaaaaaaactagacagaaactttctgagaaacttctttgtgatgtgtgctttcatctcacagggttgaaacattcatttcattgagcagtttggaaagtctttttgtagaatctgcaaagggatagttttgagctcaatgaggcctatggtgaaacaggaaataccttcacataaaaacaagacagaagctttctgagacacttctttgtgatgtgtgcttttatctcacagatttcaaactttattttgattgagaagtttggaaacagtatttttgtagaacctgcaagtgaatatttggagcacttcgaggcctatagtgaaaaaggaaatatcttcacataaaaaccagacagaacatttgtgagaaagttctttgtggtaggtgcattcatatcacgaagttgaacgtttcctttgattgagcactttggatatagtctgtttgtagagtctacaaagggatgtttgtgaatattttaaggcctgtgttgaaaaagtaaatatcttcacatataaactagacagaagaattctgagaaacttctttgtgatgtgtgcattcatctcacagagttgaacctttcttttgattcagcagtttagaaagagtttttttgtagaatctggaaatggatatttggttcactttgaggcctatggttaaaaaggaaatatcttcacataaaaactacacacaaactttctgagaaacttctttgtgatgtgtgcttcatctcactgggttgagcctgtcattttttttttattattatactttaagttctagggtacatgtgcacattgtgcaggtgagttacatatgtatacaagtgccactctggtgtgctgcacccactaactcgtcatctagcattaggtatatctctcaatgctatccctccccactcaccccaccccacaacagtccccagagtgtgatgttccccttcttgtgtccatgtgatctcatttttccattcccacctatgagtgagaatatgcggtttttgtttttttgtccttgcgatagtttactgagaatgatgatttccaatttcatccatgtccctacaaaggacatgaactcatcattttttatggctgcatagtattccatggtgtatatgtgccacattttgttaatccagtctatcattgttggacatttgggttggttccaagtctttgctattgtgaatagtgccgcaataaacatacgtgttcatgtgtctttatagcagcatgatttatagtcctttgggtatatacccaggaatggggtggctgggtcaaatggttattccagttctagatccctgaggaatcaccacactgacttccacaatggttgaactagtttacagtcccaccaacagtgtaaaagtgttcctatttctccacatcctctccagcacctgttgtttcctgactttttaatgactgccattctaaatggtgtgagatggtatcccattgtggttttgatttgcatttctctgatggccagtgatgatgagcattttttcatgtgttttttggctgcataaatatcttcttttgagaagtgtctgttcatgtccttcacccactttttgatggggttgtttgtttttttcttgtaaatttgttggagttcattgtagattctggatattagccctttgtccgatgagtaggttgcgaaaattttctcccattttgtaggttgcctgttcactctgatggtagtttcttatgctgtgcagaagctctttagtttaattagatcccatttgtcaattttgtcttttgttgtcattgcttttggtgttttagacatgaagtccttgcccatgcctatgtcctgaatggtaatgcctaggttttcttctagggtttttatggttttaggtctaacatttaagtctttaatccatcttgaattgatttttgtataaggtgtaaggaagggatccagtttcagctttctacatatggctagccagttttcccagcaccatttattaaatatggaatcctttccccattgcttgtttttctcaggtttgtcaaagatcagatagttgtagatatgttttgttatttgagaattttagacgaatatccttgatgaacattgatgcaataatcctcaataaaatactggcaaacccaatccagcagcacatcaaaaagcttattcaccttgatcaagtgggcttcatccctgggatgcaaggctggttcaatatacacaaatcaataaatgtaattcagcatataagcagagccaaagacaaaaaccacatgatcatctcaatagattcagaaaagacctttgacaaaattcaacaacgcttcatgccaaaaactctcaataaattaggtattgatgggacatatctcaaaataataagagctatctatgacaaacccacagccaatatcatactgaatgggcaaaaactggaagcattccctttgaaaattggcacaagacagggatgccctctctcaccactcctattcaacatagtgttggaagttctcgccaaggcaattaggcaggagaaggaaataaagggtattcaattaggaaaagaggaagtcaaattgtccccctgtttgcagatgacatgattgtatatctagaaaaccccattgtctcagcccaaaatctccttaagctgataagcaacttcagcaaagtctcacaatacaaaatcaatgtacaaaaatcacaagcattcttatacaccaacaacagacaaacagagagccaaatcatgagtgaactcccattcacaattgcttcaaagagaataaaatacctaggaatccaacttacaagggatgtgaaggacctcttcaaggagaactacaaaccactgctcaaggaaataaaagaggatacaaacaaatggaagtacattccatgctcatggttaggaagaatcaatatcgtgaaaatggccatactgcccaaggtaatttatagattcaatgccatccccatcaagctaccaatgactttcttcaaagaattggaaaaaactactttaaagttcatatggaaccaaaaaggagcccgcatcgcgaagtcaatcctgagccaaaagaacaaagctggaggcatcacactacctgacttcaaactatactacaaggctacagtaaccaaaacagcatggtactggtaccaaaacagagatatagatcaatggaacagaacagagcctgtcttttcgttgagcagtttggaaacagtctttttgaagaatctgcaaaggggtatttgtgagctctttgaagcctatgttggaaaaggaaatatcttcacataaaaactagacagaagctttttgagaaacttatttttgatgtttgcattcacctcacagagttgaaactttcttttctttgagcagtttgaaaatatcttgtgtgcaatctgccaacgcataacttggagtggtttgagcctatggtgtaaaagaaatatcttcacatgaaaactagacagaaccattcagagaaacttcactgtgatgagcattcatctgacagaattgaacctttcttttgattgggcagtttggaaacagtctttttcctgtatttgcaaagagatatttgtgaggcctttgaggcctaaggtgaaataggatatttcttcacataaaaactagacagaagatttctgataaacttctttgtgatgtgggcatttatcttgcagggttgaaactttcttttgattgagcagtttggaaacagtctttttgtagaatatgtagagggatatttgtgagtgctttgaggcctatggtgcaaatggaaatatctacacataaaaactagacaatagctttctaggaaacgtctttgtgatgtgtgcattcatctcacatagttgaaaatttcttttgattgagcagtttggaaacagtctttttgtagaatctccaaaggtatatttctgaattctatgatgcctacagtgaaaaaggaaatatcttcacataaaaactagacagaagcattctgagaaactctttcggatgtgtgcatttatctcacagtgttgaacctttcctttgattgagcagtttggaaaccgtatttttgtagtatctgcaaatggatatttggtgtgctttgaagcctatggttgaaaaggaaatatcttcacataaaaactaggcagaggcactctgaaaaaacttctttgtgatgtgtgcattcatagcaatgagttgaacctttctttttattcagcagtttagaaacagtcttttttgtaaaatctccaaagggtgatttgtgagtcctttgaggccaatggagaaaaaggaaatatattcacataaaaactcgacagaaggtttctgagaaactgcttgtgaagtgtgtattcatctcacaaagttgaacctttcttttgattgagcagtttggaaaccatctttgtgtagaatctgcaaagggatatttgtgagccctttgagacctatggtgaaaaaggaaatatcttcacataaaaactagatagaagctttctgagaaacttctttgtgatatgtgctttcaccttacagaggcgaaaatttcttttgattgagcactttggaaacagtcttttagtagaatctgcaaagggatatttgtgagccctttgaggcctatggtggaaaaggaattatctttacataataactagacagaaggtttatgataacctgatttgtgatgtgtgcattcatctcaaggggtaaacgtttcttttctttgagcagattggaaactctgctcttgcagaatcttcaaagggatatttgtgagcccttttattcctatggtgaaaaagtagatagctttacataaaaactagacagaaactttctgagaaacttctttgtgatgtgtgcattcatctcacagacttgaagctacttttgagtgagcagtttggaaactgtcttttcatagtaactgcaaaggtatgtttgtgagatctttgaggcctatggagaaaaaggaaatatcttcacataaaactagacagaaagtttgtgagaaactgctttctgatgtgtgcattcatctcacagagttgaataattcctttgattgagcagtttggaagcaatcttttcgtagaatctacaaaaggatatttgtgagccctttgaggcctgtggtgataatggaaatattttcacataaaaactagacagcatctgagaaacaaatttgtgatgtgtgcattcatctcacactgttgaaactttcttctgattgtgtagtttggaatcatactttatgtagaatctgcaaagggatatttgtgatccctttgaggcctatggggaaataggaactatcttcacataaaaactagacagaaggtttaggagaaactggtttgtgatgtgtgcattcatctcacagttttaaactctttctttctttgagcagattggaatctctgttcttatagaatctgcaaagggaaattggtgagtgctttgaggccagtagtgaaaaaggaaatatcttcacataaaaactagacagaagctttctgagaaacttctttgtgatatgtgcattcatgtcacagaattgaacgtattttgattgagcagtttggaaacactctttttgaagaatctgcaaggggatgtttgtgagcggtttgagatctatgatgaaaaaggaaatacctttacctaaaaactagacagaaaccttctgagaaacttctttctgatgtgtgcattcatctcatggaggtaaacgtttcttttcattgagcagattgcaaaccctgttcttgtagaatctgcaaaggtgtgtttgtgagacctttgaagcctgtggtgtaaaaggaaatatcttcatataaaaagtagacagatgctttctgagaaacttccctgtgatgtgtgctctcatctcacagagttgaacctttcttttaattgagcagattgtaaaaagtgtttttgtagaatcttcaaagggctatctgtaacgctttgtggcctatggtgaaaaaggaagtatattcacataaaaacaggacagaagcattctgagaagcttctttgtgatatgggcattcatctcgtatagttgaacctttcttttgattgagcagtttagaaagtctttttgtagaatctgcaaagggatatttatgagtggtttgaggcctatggtgaaaaaggaaatatctacacatcaaaactagagaggagttttctgagaaactgcgtagtgatgtgtgccttcatctcacagaggtaaatggtactttttattgagcagattggaaaccctgtacttgtataatctgcaaagtgatatttgtgagtgctttgaggtatatagcagaaaaggaaatattttcacataaaaagtactcagatgttttctgagaaacttccttgtgatgtatgcattcatctcacagagttgaacctttgttttgattaaggtgattggaaaaagtatttttgtaaaatctgccaatgtatatatgtgagcactttgtggcctatgttgaaaaaggaaatatcttcacataaaaactggagagaaggtttatgagaaactgctttgtgatgtatgcattcatctaatagcattgaattttctttttattgagcattttgagaaaagtctttggttagaatctgccaagggatatttgttagcactttgagctgtacggtgaaaaagagaatatcttcacataagaactagacagaagccttctgagaaactgctttgtgatgtttgcattcatctcacaatattgaacctttcttttgattgagcagtttggaagctgtctttttgtagaatctgcaaagggaaatttgtgatcgcttagaagactatggtgaaaaaggaaatatcttcacataaaaactagacagaagctttctgagaaacttctctgtaatgtgtgcattcatagcacagagttgaaccttttgtttgattgagcagtttgtaaacagtctttttgttgaatctgcaaggggataatcagagtgctttgaggcctatggtgaaaaaggaaatatcttcacataaaaactacacagaatcattctgagaaacttctttgtgatgggtgcatttatctcccagagttaaacgtttcttttgattgagcagtttggaaacagtctttttgttgaatctgcaagggaatatttatagcgctctggggcctatggtgaaaaaggaagtaacctcacttaaaaactagacagaagctttctgagaaactgttttgtgatgtgtgcattcatctcacagagttgaaactttcttttcattgagcattttggaaacaatcttttgtagaatctgcaaagggatatttggtgcactttgaggactgtggtgagaaaggaaatatcttcatataaaaactagacagaagcattctgggaaacatctctgtgatgtgtctattcaactcagagagttgaaactttcttttgattgagcagtttggaaagagtctttctatagaatctgcaaggggatatttttgagtcctttgaggtctatggtgaaaaaggaaaaatcttcacttaaaaactaggcagaaggtttctgagagactgcttcatgatgtgtgcatccatctctcagaagtaaacttttctttccattgacaatattggatactctgttcctgtagaattcgcagagggatatttgtgactgctttgaggcctacggtggaaaaggaaatatcttcacagaaatactagacagaagctttctgagaaactactttgtgatgtgtgcattcgtctcacacagttgaaactttcctttgattgagcagtatggaaaaagcctccttgcagggtctacaaagggatatttgtgagcagtttaagaactatggtgaaaaaggaattatgttctcataaaaactggacagaagcttttggagaaacttctttgtaatgcgtgtattcatctcacagagttgaaactttattttgattgagcagtttggaaaccgtctttttgtagaatcagcaaatggatatttatgagggccttgaggtctcaggtaagaaaaggaaatatcttcacataaaaactagacagaaggttcctgagaaactgttttcagatgtgtgccttcatctcacagaggtaaatgtttcttttcattgagcagattggaaactctcttttttgagaatctgcaagggaatattagtgagtggtttgaggcctattgtgaaaaaggaaatattttcacataaaaattaggcagaagctttcagagaaacttctttgtgatgtgtgcattcatctcacagatttgaacctttcttttgattgagcagtttggaaacattctttttgtagaatctgcaaagggatatttgtgagcactttgaggcttttggtgcaaaaaaggaaatatcttcatatgaaaactagacagaatttttctgagaaactgctttgtgatgcgtgcattcatctcacagagttgaaactttcttttgattgaacagtttggaaacagtctttttgtagaatctgccaagggatatttgtgagcgctttgaggcctatggtgaaaaaggaaatatcttcacataaaaactatacagaagctttctggaaaacttctttttgatgtgtgtattcatctcatgaagttgaactgtcttttgattgatcagtttagaaacagtctttctgtagtatctgcaaagggatatttgtgagggccttgaggcccatattgagaaaggaaatatcctcatataaaaactagacagaaggtttctgagtaactgctttgtgatgtgtgcattcatctcacacaagtaaacatttcttttcattgagcagattggaaactctgttcttgtagaatctgcaaagggatatttgaggaagttttgatgcctggggtgaaaaaggaaatatcttcatatgaaaacgagacagaagctttcagagaaacttctttgtgatgtatgcattcgtctcacacagttgaaccttggttttgattgagcattttggaaacgtctttttgcagaatctgcaaagagatatttttgagggccttgaggtctatggtaaaaaaaggaaatatcttcacataaaaactaaacagaagttttctgagaaagtgctttgtgatgtgtgctttcatctccagaggtaaatgtttattttcattgagccagttggaaactctgatctttgagaatctgcaaggggatatttctgagtggtttgaggcctattgtgaaaaaggaaatattttcatataaaaactagaccgaagctttctgagaaacttctttgtgatgtgttcattcatctcacagagttgaacctttcttttgattgtacagtttggaaacagtctttttgtagaatctgcaaaagtgtatttgggaaccctttgaggcatatgttgaaaaaggaaatatcttcacataaaaactagacagaagctttcttagagactgctacattttgtgggcatgcatctcacagaggtagaaatttcttttcattgagctgattggaaaccttcctcatatagtatctgcaaagggatatttgtgaccgcttttaggccagtggtgaaaaaggaaatgtcttcacataaatctagacagacgcattctgagaaacttctttgagatgtgtgcattcatctcatggagttgaacctttcttttgattgagcagtttggaaacagtcagtttgtagaatctgtaaagtgatatttgtgagcagtttgaagcgtatggtgaaaaagaaaaaatcttcccataaaaactagataggagaattctgagaaactgctttgttatgtgtgcattcatctcaaagatttgaaccctccgtttggttgagcagtttggaaacagcatttttgtagagtatgcaaagggatatttgtgagtcattggagtcctgtggtgaaaaaggaaaatcttcatatgaaaacaagacaaaggctttctgaaaaactgcttgtgatgtgtccattcatctcacatagttgaaactttcttttgaatgactagtttggaaacagtcataactgtctttttgtagaatctgcaaagggatatttgtgagtgctttgatgcctgtggtgaaaaaggaaatatcttcacataaaaaaatagaagatttccgagaaacttctttgtgatgtgtgcattcatctcacagagttgaatctttcttttgattgagcagtttggaaacagtctttttgtagaatctccaaagggatatttttcaaccctttgaggtctatggtgaaaaaggaaatatcttcacataaaaaatagacagaatgtttctgagagactgtttcatgatgagggcattcatctcaaagaggtaattatttcttttcattgagcagattggaaactctcttcttgtataatctgcaaagggatatttttgactgctttgagacctgtggtgaaaaaggaaatatcttcacataaaaactagacagaagctttctgggaaatggctttctgatgtgtgcattcatctcactgagttgaaactttcttttgattgaggagtttggaagagtcttttcatagaatctgcatagggatatttgtgattggtttgaggcctacggtgaaaaaggaaatatcttcacataaaaactagacagaagctttctgagaaacttctttgtgatgcttggattcatctcatagaattgaaactttcttttgattgatcagtttggaaagactctttttgtagagtctgtaaagggatatttgtgagctgtttgagtcctgtggtgaaaaggaaaataacttcatatgaaaactaaatagaatctttctgagaaaatgctttgtgatgtgtgcattcatctcacagagttgaaactttcttttgattgagcagtttggaaacagtctttttatagaatctgcaaaggcatatttgtgagcagtttgaggcctatggtgaaaaaggaaatatcttcacataaaaactacacagaatccttctgagaaacttctttgtgatgtgtgcattcatctcaaagagttgaacctttcttttgattaagcagtttggaggcattcttcttgtagtatctccaaaggtatatttgtgagtgctttgaggcctatggtgaaaaaggaaatatcttcacataaaaactagacagaagctttatgagaaacttctttgtgatatgtgcattcatctcacagttgaaattttcttttgaatgaatagtttggaaagtgtctttttgtagaatgtgcaaagggatatttatgagccctttgaggcctatggcaaaaaaggaaatatcttcaaataaaaattagacagaatgtttctcagaaactgcttcatgacatgggcattcatttcacagaggtaaacgtttcttttcattgagtagattggaacctctcttcttctagagtctgcaaagggatgtttgtgagcactttgaggcctattgtgaaaaaggaaatattttcacatgaaaactagacagaagctttctgagaaactactttctgatgtgtacattcatctgaaatagttgaacatttcttttgattgagcagtttggaagcactctttttgtagaatctgcaaagagatatttttgagcactttcaggcctattatgaaaaaggaaatatcttcacataaaaactagacagaagctttctgagaaaattctctgtgatgtgtgaattcatctcacatagctgagactttcttttgattgtcaatttggcaaaagtgtttttgtagcatctgcaaacggatatttgtgggctgtttgaggcctatggtgaaaaaggaaatgtcttcacataagaactagacagaagatttctgagagactgcttcatgatgttggcattcatcccacaaaggtagacattacttttcattgggcagatttgaaaccctcttcttgtagaatccacaaagttagatttgggaccactttcagtctgtggtgaaaaactaaatatcttcaaataaaaaccagacagaagcttactgagaaactgatttgtgatgtgtgcattcatctcacacagttgaaactttcttttgattgagcagtttggaaacagtctttttgtagagtctgtaaagggatatctgtgagtggtttgaggcatatggttaaaaatgaaatatcttcacataaacctagacagaaattttgtgagaaactgctttgtgatgtgtgcattaatctcaaagagttgaaactttcttttgattgagcagtgtggaaacagccttttcatagaatttccaaggggatatttgtgagccctttgaagcctatggtgaaaaaggaaatatattcacatgaaaactagacagaaggtttctgggagactgctttgggatgtgggcaatcgtctcacagaggtaaacatttattttcactgagcagattggaaactctcttgtggtatctgccaagggatatttgtgaccactttgaggcctgtggtgaaaaaggaaatatcttcacataaaaactaggcagaagctttctgagaaacttctttgtgatgcccgcattcatctcacagagttgaaactttcttttgattgatcattttggaaacagtctttttgtagaatctgtaaaggaatatttgtgagtggtttgagtcctatggtgaaaaaggaaaaatcttcacttcaaaaaatagacagaagatttctgagaaacttctctgtgatgtatgcattcatcccacagaggttaatctttctttcaattaagcagtttggaaacagcctttttgtagcatctgcaaagggatatttgtgagccctttgaggcctatggtcaaaagggaaataacttcctatgaaaactagacagaatctttctgagaaactgctttgtgatgtgtgcattcatctcacagagttgaaacttttttttttggttgagcagtttggaaacattctttttgtagatctgcaaagtgttatgtttgagcagtttgaggccaatggtgataaaggaaatatcttcccatcaaaactagacagaagctttctgagaaacttctttgtgatgtctacattcatctcagagagttgaagctttcttttgattgagcatttatggaaaaagtatttttgtagaatctgtagagggatatttgtagcaacttgaggcctatggtgaaaaaggaaatctcttcacattaaaactagacagaaggtttctcagagactgcttcatgatgtgggcattcatctcacagaggtagatatttcttttcattgagcagattggaaaccctcttcatgaagtatccgcaaagggatatttgtgaacactttgtggcctatggtgaaaaaggtaatatcttcacataaaaactagacagaagcattctgagacacttctttgtaatgtgtgcattcaactcacagacttgaacgtttcttttgattgagcagcttggaaacagtctttttgtagaatctgtaaagggatatttggagcaatttcaggcctatggtgaaaaaggaaatatcttcacacaaaaagtagacagaatggttctgacagactgcttagtgatgagggcattcatctcaaagaggtaaagatttcttttcattgaacatattggaaactctcttcttgtagaatctgcaatgggatatttgtgactgctttgaatcctgtggtgaaaaaggaaatatcttcacataaaaactagacagacgcattcttggaaactgctttctgatgtgtacattcatctcacagatttgaacctttctttcgatggagcagtttggaagagtcttcttgtagaatctacatagggatatttgtgagcaatttgaggcctgtggtgagaaaggaaatatcttcacataaaaactagacagaagttttcagagaaacttcattgtgatgtgtgcactaatctgacagagatgaacctttcttttgattgagcagtttggaaagaatctttttctagagcctgcaaagggatatttgtgagcactttgaagcctgtggtggaaaaggaaatatcttcacataaaaattcgacagaagctttctgagaaacttctttgttatgtgtgcattcatttcacagaggtaagcattccttttccttgggaagatttgaagctcttttcttttagaatcgaaggggatatttgtgagcgctttgagacctacagtgaaaaaggaaatatcttcacataaaaactacatagaatctttctgagaaacttctttgtgatgtgtgcattcatctcacagatttgaaccttccttttgattgagcagtttggagactgtcataacagtctttttgtagaatctgcaaggggatatttgtgagtggtttgaggtctagggtgaaaaaggaaatatcttcacatgaaaactagatagaaggtttctgagaaatttctttgtgatgtgtgcatttttctcaaagtgttgaaccattcttttgattgagcagtttggaaaaagtctttttgtagcatctgcaaagggacatttgtgagcactttgaggtctgtggtgaaaaaggaaatatattcccataaaaactagacagaagatttctgagaaacttcattgtgatgcctgcattcatctcacagagttgaaactttcttttgattaatcagtttggaaacagtcattttgcagaagctgtaaagggatatttgtgagtggtttgagtcctatggtgaaaaaggaaaaatcttcacataaaaaccagacagaagatttctgagaaacttctttgtgatgtggcatttatcccacagagtgaacctttctttcagttaagcagtttggaaacagcctttttgttggatctgcaaagggatatttgtgagccctttgaggccattgctgaaaagggaaataacttcataggaaaactagacagaatctttctgagaaactgctttgtgatgtgtgcattcatctgacagagtggaaactttcttttgattgggcagtttggaaacattatttttgtagaatctgcaaagtgttatttgtgaacggttttaggcctacggtgaaaaaggaaatatcttcatataaaaactaggcagaagctttctgcaaaacttttttgtggtatgtgcattcatctcacagagttgaaactttcttttgattgaatagtttggaaagcgtctttttgtagaatctgcaaagggatatttgtgattgctttgaggcctatggtgaataaggaaatatcttcatataaaaactagacagaaggttactgagaagctggttcatgatgtgggcattcatctcacagaagtaaacgtttcttttcattgagcagataggaaactctgatcttgtagtatctgcaaagggagatttgtgaggactttgaggcatatgatgaaaaagaaaatatcgtcacataaaaattaggcagtagcttcatgagaaacttctttgtgatgtgtgcatttatcacacagagttgaacctctctttgcattgagcagtttgcaaaagtacttttgtagaatctgcaaagggatatctttgagcgctttgaggcttatggtgaaaaaggaaataacttcacataaaaacgagacagaagatttctgagaaacttctttgtattgtgtgcagccatctcacagtgtttaacttctgttttcatggagcagtttggaaacagtatttttgtagaatctgcaaagggatatttctgagcgctttgagtcctatggtgaaaaaggaaatatcttcacgtggaaactagacagaagttttctgagaaacttctttgtgatgtgtgcactcatctcacggagttgaacctttcttttgattgaatagtttggaaatagtcctattgtcgaatgtacaaagggatatttgtgagcgcttggagggctgtgggaaaaaaaggaaatatcttcatataaaaactagaaagaagctttttgtgaaactattttgtgatttgtgcattcatgttacagagctgaatatttcccttgatggagcagcttggaaacagtcttcggatactctgtatggggatatttgtctgccctttgaggcctgttttgaaaaagtatatatcttcacatgaaaactcgataaaagatttctgaaaaactgatttgtgatgtgtgcattcatctcacagagttgaacctttctttttattgagcagtttggaaacagtctttttgtggaatctgcaaaggcatatttgtgagcactttgaggcctagggtgaaaaaggaaatatcttcacatgaaaaccagacagaagctttctgagaaacttctttgtgatgtgtgcattcagctcacagtgttgaacttttcttttgattgagcagtttggaaaacatctttttgtagtatctgcatagggatatttgtgagtggtttgaggactatggtgaaaaaggaaatacctacacataaaaactagactggacctttcagagaaacttcttcatgctgtgttcattcatctcacagggttgaaactttcttttgattgagcattttggaaacagtctttttgtagaatctgcaaagggatatttgtgagccctttgtggtctatgcagaaaaagaatatatcttcacatgaaaactagatagaaggtttctgagaaatttctttgtgatgtgtgcatttttctcagagttgaaccattattttgattgagcagtttagaaaaagtctttttgtagcatctgcaaagggatgtttgtgagcactttgaggtctatgttgaaaaaggaaatatcttcacataaaaactagacataatatttctgagagactgcttaatgatgtgggcattcatctcatagaggtagacattacttctcattgagcagattggaaaccctcttcttgtagaatccacagagggagatttgtgaccgccctcaggcctgtggtgaaaaaggtaatatcttcacataaaaactagatagtagcattctgagacacttctttgtgatgtgtgcattcatctcacagagttgaacctttcttttggttgagcagtttggaaacagtctttttgtagaatctgtaaagggatatttttgagcggtttgaggcctatggtgaaaaatgaaatatcttcacataaaaaccatacagaagttttctgaggaactgctttgtgatgtgcattaatctcacagagttgaacatttcttttgattaagtagtttggaaacagtgtttctgtagaatctgcaaagggatatttgtgagtggtaggaggcctaaggtgaaaaaggaaatatcttcacataaaaactagagagaagctttctgagaaacttctttgtgatgtgtgcattcatctcacataattgaaccttttttttgattgagcagattggaaacagtcatagcagtctttttgtagaatctgcaaagggatatttgtgatcgctttgaggcctatggtggaaaaggaaatatattcatgtagaaactacccagaatctttctgagaaactactttttgatgtgtgcattcatctcacagagttgaacctttgtttttattgagaagtttggaaattgtcattaccatcttttggtagaatctgaaaagggatatttttgagcggtttgagtcctgtgtgaaaagggaaataacttcatataaaaactagacagaagctttctgagaaacttctttgtgatgtgtgcattcatctcaaagggttaaacctttcttttgattaagcagtttggagacattctttttgtagtatctccaaaggtgtatttttgagtgctttgaggcctatggtgaaaaaggaaatatcttcacatgaaaactaaatggaagctttctgagaaacttctttgtgatatgtgcattcatctcacagatttgaaactttcttttgattgaatagttcagaaagtgtctttttgtagaatctgcaaagggatatttttgagccctttgacgtctatggcaaaaaaggaaatatcttcacataaaaattagacaaaatatttctcagaaactgcttcatgacataggcattcatctcacagaggtaaacgtttcttttcattgagcagattggaaactctcttcttctggattctgcaaagagatatttgcgagtgctctaaggcctatggtgaaaaaggaaatatcttcacatgaaaactagacagaagctttctgagaaactactttgtgatgtgtacattcatctcaaatagttaaagctttcttttgattgagcagtttggaaacactctttttatagaatctgcaaaggtatatttgtgagcactttgaagcctattatgaaagaggaaatatcttcaaatgaaaactaggcagaagctttctgagaaccttctttgtgatgtgtgaattcatctcacatagttgaatttttcttttgattgagcaatttcgaaaaagtgtttttgtagcatctgcaaatggatatttgtgagccctttgaggccgatggtgaaaaaggaaatatctaaacataagaactaggcagaaggtttctgagagactgcttcttgatgtgggcattcatgtcacagaggtagacattacttttcattgagcagattggaaaccctcttcttgtagaatccgcaaagttagatttgggactgctttcaggcctgtggcgaaaaaggaaatatcatcacataaaaaccagacagaagctttcacaaaaacttctttgtgatgtatgcattaatctcaaagtgttgaaacttcctattgattgagcactgtggaaacagttattttgtagaatctgcaaagggatatttgtgagctctttgaggcctatggtgaaaaaggaaatatcttcacttgaaaactagacagaagatgtctaagagactgcttcgtgatgtgggcattcatctcacagaggtaaacatttcttttcaactctcttcttgtagtatccacaaagggatatttgtgaccgttctgaggcctgttttgaaaaaggatatatcttcacataaaaactaggcaggaggtttctaagagactgctttttgatgcgtgcatccacctcacacaggtaaatgtctcttatcattgagtagattggaaactcttttcttacagaatctgcaaagggatatttttgagcacttggaggcctatggtgaaaaagtaaatatcttcacataaaaactacaaagaatctttctgagaaacttccttgtgatgtgtgcattcagctcacagagttgaacctttcttttgattgagcagattggaaacagtcataacagtccttgtagaatctgcaaaggaatagttgtgagcgctttgaggcctatggtgaaatagaaaatatcttcacataaaaactagacagaagattcctgaaaaactcctttgagctgtgtgcatttatcccacagagttgaacctttctttccgttgagcagtttggaaacagtctttttgtagaatctgcaaggggatatttgtgagcgcttgagacctatggtgaaaaagacctatcttcacataaaaaccagaaagaaggattctgagagactgcttcctgatgtgagcattcgtctcacagaggtaaacatttcttttcactgagcagattggaaactctcttcttgtagtatccacaaagggatatttgtgaccactttgaggcctgtggtgaaaagggaaatatattcccataaaaactagacagaagatttctgagaaacttcattgtgatgcctgcattcatctcacagagttgaaactttcttttgattaatcagtttggaaacagtctttttgcagaagctgtaaagggatatttgtgagtggtttgagtcctatggtgaaaaaggaaaaatcttcacataaaaaccagacagaagatttctgagaaacttctttgtgatgtggcatttatcccacagaggtgaacttttctttcaattaagcagtttggaaacagcctttttgttggatctgcaaagggatatttgtgagccctttgaggccattgctgaaaagggaaataacttcataggaaaactagacagaatctttctgagaaactgctttgtgatgtgtgcattcatctgacagagtggaaactttcttttggttgagcagtttggaaacattatttttgtagaatctgcaaagggatatttgtgtgtggtttgatgcctatggtgaaaaataaaatatcttcacataaaaactagaaaggagctttctgagaaacttctttgtgacgtgcgcattcatctcacagagttgaaactttctatggattgagcagtttgaaaacagtctttgtgtagaatctacaaagcgatatttgtgagcttgttgagacctatggtgaaaaaggaaatatcttcatataaaaaccagacagaagctttctgagatacttccttgagatgtgtgcattcatctcactaaatagaaccttgagtagtttgtaaacagtctttttgtagaatctgcaatccgatatttgtgagcccttggtggcctatggtgaaaaaggatatacattcacataaaaactaggcagaaggcttctgagaatctgatttgtgatgtgtgcattcatctgacagaggtaaatgtttcttttcattgatcagatgggaaactctcttcttgtagaatctgcaatgagatacttgtgagtgctttgaagcctatggtgaaaaagtaaatatcttcacataaaaagtagacaaaagctttttgagaaacttctttgtgatatgtgctttcatctcacacagttcaaactttcttttgattgagcagtttggaaaaaatctttttgtagaaaatgcaaagggatatttgtgagtggcttgaggcctatggatggaaaggaaatatcttcacataaatactagacagaagctttctgagaaacttctttgtgatgtgcacattcatctcacagacgtaaacctttcttttcattgtggagattgtaaactctgttcttgcagtatctggaaagggatatttctgagcgctttgaggcctgtggtgaaaaaggaaatatcttcacataaaaagtagacagaagctttctgagaaacttctttgtgaaatgtgcatacatctcacagagttgagcctttcctttgactgagcagtttggaaacagtctttttgtagaatcttcaaagggatatttgcgaacactttgaggtctatagtgaaaaaggaaatatcttcacataaaaactagagagaagtatactgagaaactgctttgaaatctgtgcattcatctcacagaggttaacctttctttacattgagcagattggatattatgttcttatagaatctgaaaaggcatatttttgagtgctttgagtcgtatggttaaaaaggaaatatcttcacataaaaactagacagaaactttctgagaaacttctttgtgatatgtgcactcatctcacagagttgaacctttctgagtagtttgaaaatagtcttattgtcgaatctgcaaagggatacttctgagtgcttggagggctgtggtgaaaaaggaaatatcttcatataaaagctagaaagaagttttctgtaaaacttttttgtgatttgtgcattcatctcacagaggtgaacaattcccttgagggaaaagtttggaagcagtctttttggagaatctgcatagggatatttgtctgccctttgaggtctgttttgaaaaagtatatatcttcacatgaaacctcgacaaaagctttctgaaaaactgctttgcgatgtgtgcattcatctcacagagttgaacttttctttttattgactagtttggaaacagttttttttcgtggaatctgcaaagggatatttgtgagtactttgaggcctagggtgaaaaaggaaatatcttcacatgaaaaccagacagaaactttctgagaaacttcttctttttatagaatctgcatatggatatttgtgagcagtttgaagactatggtgaaaaaggaaatatctacacataaaagctagacagaacctttcagagaaacttctttgtgatgtgtgcattcatctcacagagttttgtctttcttttgagtaagcagtttggaaacagtccttttgtagaaactgcaaagggatatttttgtgtgctctgaggcatatggtgaaaaaggaaatatcttcacataaaaactagacagaagctttctgagaaactttcttttgatgtgtgctttcatcttacagtgttgaaacttacatttgattgactagtttggaaacagtctttttgtagaatctgcaaagggatgtttgtgatccctttgaggcatatgatgaaaaaggaaatatcttcacataaaaacaagacagaagattcctgagaaactgcttagggacatgggcattcatttcatagaggtaaacgtttcttttcattgagcagataggaaactctgatcttgtcaaatctgcagagggatatttgtgagtgctttgaggcctatggtgaaaaaggaaatatctacagataaaaactggacagaagtttctgagaaacttctttgtgatgtgtgcattcaactcaaagggttcaacctttcttttgattgagctgtttgaaaacacactttttgtggaatctgcaaacagatatttgtgagcggtttggggcctatggtgaaaaaggaaatatcttcacataaaaactagacgaaagctttctcagaaacttctttgtgatgtgtgcattcatctcacagagatcaacatttcttcttgttgagcagtttggaaaaagtctttctgtggaatctgcaaagggatatttgtgagtgctttgaggcctgtggtgaaaaaggaaatatcttcagataaaaactggacagaagctttctgagaaacttctttgtgatttgtgcattcaactcaaagagttcaacctttcttttgattgagctgtttggaaacacgctttttgtggaatctgcaaacagatatttgtgagcggtttggggcctatggtgaaaaaggaaatatcttcacataaaaactagacgaaagctttctcagaaacttctttgtgatgtgtgcattcaactcaaagagttcaacctttcttttaattgagctgtttggaaacacgctttttgtggaatctgcaaacagatatttgtgagcggtttggggcctatggtgaaaaaggaaatagcttcacataaaaactagatgaaacctttctcagaaacttctttgtgatgtgtgcattcatctcacagagatgaacatttcttcttgttgagcagtttggaaaaagtctttctgtggaatctgcaaagggatgtttgtgatccctttgaggcatatgatgaaaaaggaaacatcttcacataaaaactagacagaaacattctgagaaatttctttgtgatgtgttcattgatcttacataaagttgaatctttatgtggattgagtagtttggaaacattctttttgtagaatctgcaaagggatgtttgtgactcctttgaggactatggtgaaaaagcaaatgtcttcccttcaaaactagacagaaggtttctgagaaactgctttttgatatgtgcacccatctcacagagataaaagtttcttttcattgagcagattggaaactctgttcttgtagaatccgcaaagggatatttgtgagcgctttaaggctatggtgaaaaagggaatgccttcacataaaaactagacagaatatttctgggaaacttcttgtgatgtgtgcattcatctctcagtgttgaactgtcttttgattgagcagtttggaaactgtctttttgtaaaatatgcaaagggatacttgtgagccctttgaggcctatggtgaaaaaggaagtatcttcacataaaaagtagacagggggtttatgagaaactgctttgtgatgtgtgcattcatttcacagtgttgaatctttcttttgattgagcagtttgggaacagtctttttgcagtatctccaaatggatatttgtgagccctttgatgcctatggttaaaaaggaaatatctttaataaaaactagacagaagctttgtgagaaacttctttgtgatgtgtgcattcatctcacagagttgaaaatttcttttcattgagcagtttcaaaacagtctttttgtagaatattcaaagggatattttagagtggtttgaagcccatgttgaaaaaggaaatatcatcacacaaaaaccagacagaaaatttctgagaaacttctttgtgatgtatactttcatctaacagagttgaacttttcttttgtttgagcagttgggaaactctctttttgtagaatctgcaaagggatatttctgagtgcttttaagcctatcgtgaaaaagaaaatatcttcatataaaaaatacagagatgttttctgagaaacttctttgtgatgtgtgcattcatctgacagagttgaaattttcctttgactgagcagtttggaaaccatctttttgtggaaagttccatgggatatttggagcgctttgaggcctatggtgaaaaaggaaatatcttcacataaaaactggacagaagatttctgagaaacttctttgtgatatgtgcattcatctcacagtgttgaaactttcctttgatttagcagtgtggaaacagtctttttgtaaaatctgcaaagggatatttgtgagctgttagaggcctatggtggaaaaggaaatatcttcatataaatactagacagaagctttctgagaaactaatttgtgatgtgtgctttcatctcacagagttgaatctttcttttgattaagctggctggaaacagtctttttgtagaatttgcaaagggatatttggggtgctttgagacctatgttgaaaaaggaaatatcttaatataaaaagtagacagaagctttctgagaaacatcattgtgatgtgtgccttcaactcacagagttgaacctttcttttgattgatcagtttggaaactgtcttttgtagaatctacaaagggatatttggagctctttgagacctatggttaaaaaggacatatcttcccataaaaactagatagaagctttctgagaaacttccttatgatgtgtgcgttcatctcacagagttcaacgtttcttttgattgagcagtatggaaacattctttttgtagaatctgcaaaggaataggtgtgagtggtttcaagcctatggtgaaaaaggagataccttcacataaaaactagacagaagcttcctgagaaacttctttgtgatatgtgcattcatctcactgagttgaaactttcttttgattgagcagtttggtaatagtttcttgtagaatctgcaaagggatatttgtgagttcttggtcacctatggtagaaagggatatatctttacataaaaagtagagagaagttttctgagaaactgacttgttacatgtgcattcatcccacagaagtaaacgtttcttttcattgatctgattggaaattctgttcttctggaatctgcaaagggatatttattagccctttgaggcctatagtgaaaaaggaaataccttcatataaaaactagacagaagcattctgggagacttctttctgatgtgtgcattcatctcacagagttgaacctgtcctttgattgagcagtttggaaacagtctttttataggatctgcaaatggatatttggagcactttgaggcttattgtgaaaaaggaaatatcttcacataaaacctagacagaaactttctgagaaactactttatgatgtgtgctttcatctcacacagttgaacctttcttttcatttagcagtttggaagcagtctttttctagtatctacaaggggatatttgtgagcataaggcctatggagaaaaaggaagtatctgcacttaaaaactagacagaagcttcttagaaacttctttgtgatgtgtggattcatctcacagatttgaaagttccctttgattgaacagtttagaaaaggtctttttgtagtatctgcaaaggtatatttgtgagcagtttcaggcctatggtgaaaaaggaaataccttcacataaaaactagacagaagttttctgagaaacttctttgtgatatgtgcattcatctcactgagttgaaaatttcttttcattgagcactttggtaacagttttttgtagaatctgccaactgatatttgtgagcccttggtcacctatggtgaaaaaggatatatgtttacataaaaagtagagagaagttttctgagaaactgatttgtgatgtgtgcattcatctcacagattttaacctttcttttgattgagcagtttggaaactcttttggtaggatctgcaaagggatatttgtgagcagtttgatgcctatggtgaaaaaggaaatatcttcacataaaaactagacagaaactttctaggaaacttctttgtgatttgtacattcatctcacagagttaaaactttctatttattgagcactttgaaaacagtctgtgtgtagaatctacaatgggatatttgtgagtgctttgagacgtattttgaaaaaggaaatatcttcatatagaaactagacggaagctttctgagaaacatatttgttatgtgtgctttcatcccactgagatgaaccattcttttgattgagcattttggaaacagtctttttgtagaatatgcaaagggatatttgtgagcctttggtgacctatggtgaaataggatatatcttcacataaaaactggacagaaggcttctgagaatatgatttgtgatgtgtgcattcatctcacagaggtaagcatttctcttcattgatcagattggaaactctcttcttgcagaaactgcaaagggatatttgtgagcactttgagtcctatggtgaaaaaggaaacatgtttgcattaaaacaagataaaagcattgggagaaacttctttgtgacatgtacattcatctcatggatatgaacctttattttgattcagcagtttggaagaagactttttgtagaatgttcaaagggatatttgtgagcagtttgaggcctacggtggaaaaggaaatatcttcatataaaaactagacagaagctttctgagaaactcctttgtgatgtgtgcactcaactcacaggtgtaaacgtttcttttcattgagcagattggaatctctgttcttgtggaaactgccaggggatatttggagtgcattgaggcctatggtgaacaatgaaatatcttaacataaaaagtagacagaagctctttgagaaacttctatgtgatgtgtggattcatctcacagagtggaaactttcttatgattgagcagtttggaaacagtcttttcgtagaatctgccaagggatattttgatcgctttttggtctattttgaaaaaggaaatatcttcacataaaaattagacagtacctttttgagaaacttctttgtgatgtgtgcattcatctcacacagttgaacacttcttgtgattgagcagtttggaaacagtctttttgtggaatctgcaaagggatatttggacagctttgaggacaatggtggaaaaggaaatatcttaacatacaaactagacagaagctttctgagaaatttccttgtgatgtgtgccttcatctcacagagttgaaaacttcttctgattgagcagtttggaaacagtctttttgaagaaacttccaaaggatatttggagggctttgaggcatatggtgaaaaaggaaatatcttatcataaacactagacagaagttttctgagaaacttctctgtgatgtttgcattcatcttacagagttgaaactttcttctgatagagcagttttcaaacagtctttttgtagaaactgcaaagggatatttgtgagatgtttgagacctatttggaaaaggtaatatcttaacataaaacctagacagaagatttctgagaaacttctttgtgacatgtgctttcatctcacagaattgaacctgtcttttgattgagcagtttggaaacagtctttgtgtagaatcagcaaatggatatttggagcactttcaggcatatggcgaaaaagggtatatgtccacatgaaaactagacagaagtttactgagaacttattcataatgtgtgcgttcatctcacagagttgaacatttcttttcattgagtagtttgaaaacaggtttttgtagtatctaaaaaagatatttggagttccttgaggcctatggtgaaaaaggaaatatcttaatataaaaactagacagaagctttctgagaaacttctttgtgatgtctgcattcatctcacagagatgaaacttactgttcattgagcagttaggaaacagtcctttcgtataatctaccaaggtatatttgtgtgcagtttgagacctatggggaaaaaggaaatatcttcacataaaaagtagacagaagctttctgagaaactactttgtgatgtgtgctttcatctcacagagttgaatctttcttttgactgagcattttgaaacagcctttttgtagaatctgcaattggatatttagagcgattagagacctaaggtgaaaaaggaaatatcttaacataatcactagaaagaaactttctgagaaacttctttgtgatgtctgctttcatctcaaacagttgaacctttcttttcattcagcagtttggaaacagtctttttgtagagtctacaaaggtatatttgtgagctgtttgaggcctatggtgaaaaaggaaatatatttatataaaatctacacagaagattttgagaaatttctttgtgatctttgtattcatctcacagagctgaacctttcttttgattgagcagtttggaaacagtctttttgtagaagttgcaaatggatatttggagtgctttgaggcctataatgaataatggatatcttcatataaaaactggacagaagatttctgaaaaacttccttgtgatgtgtgcattcatctcacagagttgaaactttcttttcattgagcagtttggaaagagtctttttgaagaatctaccacgggatatttggagggctttgaggaatatggtgaaaaagggaacatcttaaaataagaactagacagaagttttctgataaacatctttttgatgtgtgcattcatctcacagagttgaaactttcttctgattgagcagttttgaaacagtccttttgtagaatctgcaaagggatatttttgagtggtttgaggcctatggtgaaaaaggaaatatcttaaaataaaacctagacagaagctttctgagaaacttctttgtgatgtgtgcattcatcaaacagagttgaaacttcttttcattgagcagtttggaaaaagtctttttgaagaatctaccaagggatacatggagctcttttagtcctatggtgaaaaaggaaatatcttaacataaaaactagatagaatttttctgagaaacttctttgtggtgtgtgcattcatcaaacagagttgaaagtttcttctcattgagcagtttggaaaaagtctttttgaagaatctaccaaagtatacatggagctcttttagtcctatggtgaaaaagaaaatatcttaacataaaaactagatagaatttttctgagaaatttctttgtgatgtgtgcattcatctcacagagttgaaactttcttctgattgagcagtttcaatacagtctttttgtagtatctgccaagggatatttgtgagtggtttgaggcctatttcaagaaaggaaataccttcacttaaaactagacggaaactttttgggaaactcctctgtgatgtgtgcattcatctcacaggttgaatctttctttgattgagtagtttggaaacagtctgtagaatctgcaaatggatatttggagtgctttgaggcctaaggtgaaaaaggaaatagcgtcacaaaaaaactagacagaagctctctgagcagcttctttgtgatgtgttcattcacctcactgtgttgaacctctcttttgattgagcagcttggaaacagtctttttgtaaaatctgcaaaggaatatttgtgggcagtttgaagcctatggcaaaaaagaaaatatcttaacataaaaagtagaaagaagcattctgagaaacttctttgtgatgtgtgcattcatctgacagagatgaatctttcttttgattgagcactttggaaacagtctttttgtagaatctgccaagggatatggggagtgcttagaggcatatggtgaaaaaggaattttcttcacataaaaactagacagaagcattctgagaaacctctttgtgatggatgcactcatctcacatagttgaacatttcttctcaatgagcagttttgaagtggtctttttgtattatctaaaaagggataattggagcactttgaggcctatgatgaaaaaggaaatatcttcacataaaaactagacacaagcttcttcagaaactactttttgatgtgtgcattcatctcacagagttgtacctttcttttgattgagcattttggtaactgtctttttgtagaatctgcaaagggatatttgtgagcgatttaaggcctatggtgaaaaaggaaatatcttcacataaaaactagacagaggctttctgagaaacttctttgtgatgtgtgcattcatctcacagagtggaacctttcttttgattgagtagtttggaaaaagtatttttgtagaatctgcaaatggaaatttggagcactgtgaggcaaaggtgaaaaaggaaatatcttcacataaaaactagacagaatctttatgagaaacttccttgtgatgtgggcattcatctcacagatttgaaccattcttttgattgagcagtttggacacagtcttttttagaatccgcaaaggaatatttctgagcagtttgaggcttatggtgacaaaggaaatatcttcacataaacactagacagaacctttttgatatacttctttgagatgcatcaattcatctcacagagttgaacatttcttttaattgagcagtttggaaacagtctttttgtggaaactgcaaagggatatttggagtactttgtggcctatggtggaaaagaaatatcttcacataaacgctagacagaagatttctgagaaacttctttgtgatgtttgcattcatctgacactgttacaccattcttttggatgatcagtttggaaacagtctttttgtataatctgcaaatggatacttgtagcactttgaggtctgtggtgtaaaaggaagtatcttcacgtaaaaactagaaggaagctttctgagaaacttatttgtgatgtgtgcattcatcgcacagtgttgaaagtttcttttgattgaacagtttggaaacaggctttttgtagaatatgccaagggatattaggagtgctttgaggcctatgttgaaagaggaattatcttcacataaaatctagacagaatcttctttgtgatgtgtgcattcataatacacagttgaacctctcttttcactgagcagtttggaaacagtctttttgtagaatctgcaaacgaatattcggagggctttgtatcctatggtgaaaaaggaaacatcttcacataaacactatacagaagctttttgagaaacatctttgtgatgtgtgcattcatctcacagcgttgaaactttcttttcattgaacagtttgcaaacagtctttttgtagaatctgcatagggatatttggagccatttgaggcctacagtgaataaggaaatatcttcacataaaaactacacagacacattctgagaaactttgtgatgtgtgtattcatgtcacattgttgaaaatttatttcaattaagtagtttggaaagagtctttttgtagaatcagcaaagggatatttgagacccatttgaggcctatagtgaaaaagaaaatatcttcacataaaaactagacagaagttttctgagaaatttctttgtgacgtgtgcattcatctctcagagttgaacctttcttttgattgagcagtttggaaaaagtcttttgcagaacctgcaaagggataattggagcgctttcaggcctatggggaaaaaggaaatatttccacataaaaactagacagaagctttcttagaaacttctttgtcatgtgtgcattcatctcacagagattaacatttcttttgatggagcagtttggtatcaggctttttgtagaatctgcaaatggatacttggagtgttttgaggcttatggtgaaaaaggaaatatcttcacataaagactagacagaagatttctgagaaacatctttccaatgtgtgcattcacatcagagatttgaaactttcttttgattgagcagttttgaaacaatatttttgtaggatatgcaaaggggtaattgtgaggggtttgaggcctatggtggaaaaggaaatatctacacataaaaactaggcagaagctttttgagatacgtctttgtgatgtgtgcactcatctcacagaattgaacctttcttttcattgagcagtttggaaacagtctttttgtggactctgcaaaggactatttggaccgcgttgtgcatatggtgaaaaaggaaatatcttcacataaacactacatagaagctttctgagaaacttttttgtgatgtgtgcattcatctcacagagttgaaactttcttttgattgagcagtttagaaactgtctatttatagaatcttcatagggatatttttgagccctttgaggcctatagtggaaaatgaattatcttcacataaaaatcagagagaaactttttgagaaacttgtatgtgatgtgtgcatttatctcacagagtcaaagagttcttttgattgagcagtgtggaaacagtctttttgtagaatctgcaaagggatatttgtgagcactttgaggcttatggtgaaaaagaaatatcttcacataagaactagaaagaaggcatccgagagactgctttctgatgtgtaaattcttctaacagaagcaaacatttcttttaactgaacagattggaaactcctttcttgtagaatatgcaaacggatatttttgagcacagggaggactatgatgaaaaaggaaatatcttcacataaaaattagaaagaagctctctgtgaaacttctttgtgatgtgtgcattctcacagagttgaatctttattttgattgagcagtttagaaacagtctctttatagaatctgcaaaggaatatttgtgagccctttgaggcctatggtgaaaaaggaaatatcatcacataaaaactacacagaaactttctgagaaactgcttcatgctgtgtgcattcatctcacatagttgaatctttcttttgattgagaagctttgacagactctttttgtggaatctgcaatgggatatttttgatggcttgagacatattttgagaaagaaatatcttcacattaaaactagaaagatggcttctgagaaacagctgtctggtgtctgcattcatctcacagaggtaaacgattattttcattgatcaaattgcaaactctgttcttgtagattcttcaaagggatatttgtaagcgctttgaggcctgtggtgctatggtgaaaaaggaaatatcttcacataaaaaccagacagaagatttctgagaaacttcattgtgatgtgtacattcatctctcagagttgaactttcttttcattgagcagtttggaaacagttttcatgtagaatctgcaaacggatatttctgtgcgctttgatgcctatgttgaaaaaggaaatatctttacgtaaaaagtagacagaagctctctgagaaacttatttgtgatgtgtgccttcatcaggcagagttgaaccattcttttgatagagcagtttggaaacagtctttttgtagaatctgtaaagggatatttgtgttcactttgaggccgatggtgaaaaataaaaatcttcacataaaaactagaaagatggtatctgagaaactactttctgatgtgtgaattcttctaacagaagtaaaagtttcttttcactgagcagattagaaactcttttcttgtagaatatgcaaacggatatttttgagcacagtaaggactatgttgaaaaaggaaatatcttcacataaaactagacagatgttttttgagaaacttcttttttatgggtgtattattctcacagagttgaacccttattttgattgagaagtttggaaacagtttttttgtagaatctgcaaaaggatatttgtgagtgcttggaggactatggtgaaaaaggaaatctcttcacataaaaactaaacagaagctttctgaaaaacgtctttgtgatttttgcattcatctcacagagttcaaactttgttttgattgagcagtttggaaatagtcttcttatagaatctgcatagggatattttcaagccctttgaggcctatggtggaaatatcttcacataaaaattagataaaaggtttctgagaaactgcttcatgatgtgtgcattcatctcacagaggtaaatgttacctttcattgagcagattggaaactctgctcttgtaaaatatgcataggaatattcgcaagtgctttgaggcctacggtaaaaaacgaaatatcttcacagaaaaactagaccgaagctttctgagaaacttccttgtgatgtgtgcattcatctcacagagataaaactttcttttcatagagcagtttggatgcagtccttttttagaatcttcatagggacattagtgagcggcttctggactgtggtgaaaaaggaaatatgttcacataaaaatagacagaattcttctgagaaactttttttgatgcatgcattcatctcacagagttgaaattttcttttgatttagcaggttggaaagagtctttttgtagtgtctgcaaagtgaaatttgtgagcattttgaggcctattgtaagaaaggcaatatcttcacataaatctagacagaaacattctaagaaactcctttgtgatgagtagattcatctgacacatgtgaaccttacttttgattgagttgttttgaaagagtctttttgtagaatatgcaaagggacaatttttagtgctttgaggcctgctttgtgatctgtgcattcatctcacagagttgaaatattattttttgagaggtttggaaacagactttttgtagaatctgcagatggatatttgtgagcagtttgagccctattgtcaaaaataaatatcttcacataaaaagtatgaagacagtttctgggacactgctttgtgatggttgcattcatctctcagaggtaaacgattcttatcattgagcagattggaaactctgttcttgtaaaatctgcaaagggatatttgtgagtgctttgaggcctatggtgaaaaaggaagtatcttcacataaaaactagaaagaagctttctgagaaacttcttcatgatgtgtgaattcatctcacagagttgaacctttcttttgattgagcagcttggaaacagtatttctgtagaatctgcaaagagatatttgtgagtgctttgaggtgtatggtgaaaaagaaataccttcacatgcttatgacctgaatggtattgcctaggttttcctctaggatttttattttttagatctaacatgcaagtctttaatcaatcttgaattaatttttttatagggtgtaaggaagggatccagtttcagctttctacatatggctagcaggttttcccagcaccatttattaaataaggaatccattcccccttactagtttttgtcaggtttgtcaaagatcagagagttgtagatatgtggcattatttctgagggctctgttctgttccattgatctatacctctgttttggtacaagtaccatgctgttttggttactgtagtcttttaatatgatttgaagtcaggtagcgtgatgcccccagctttgttcttttggtttaggattgacttggtgatgtgggctcttttctggttccatatgaactttaaagtagtttttccaattctgtggagaaagtcattggtagcttgatggggatggcattgaatctataaattaccttgggcaatattgtcattttaacgatattgattcttcctactcatgatcatggaatgttcttccgtttgtttgaattctcttttatttcattgagcagtggtttgtagttctcatttaagaggtccttcacatcccttctaagttgcattcctaggtattttattctctttgaaacaattgtgaatgggagttcactaaaactccaaaagcaatggcaactaaagacaaaattgagaaatgggatctaattaaactaaaaagcttctgcacagcaaaagaaactaccatcagagtgaacaggcaacctacaaaatgggagaaaatttttgcaacctactcatctgacaaaggggtaacatcaagaatctacaatgaactcaaacaaatttacaagaaaaaaacaaacaaccccatcaaaaagtgggtgaagaatatgaacagacacttctcacaagaagatatttatacagcaaaaaaaaaaaaaaaaacataaaaaatgctcatcattactggccatcagataaatgcaaatcaaaaccacaatgagataccatctcacaccagttagaatggtgatcattaaaaagttaggaaacaacaggtgctggagagggtgtggagacacaggaacacttttacactcttggtgggacggtaaaataattcaaccattgtggaagtcagtgtggtgattcctcagggatctagaactagaaataccatttgacccaaccatcccattactgagtatataaccaaaggatgataaatcatggtgctataaagacacatgcacacgtatgtttattgtggcactattcacaatagcaaagacttggaacctacccaaatgtccaacaacgatagactggattaagaaaatgtggcacatatacaccatggaatactatgcagccataaaaaatgatgagttcatgtcctttgtagggacatggatgaaactggaaaccatcattctcaggaaactatcacaaggagaaaaaaccaaacactgcatcttctcactcataggtgggaattgaacaatgagaacacatggacacaggaaggggaacatcacgctctggggactgttgtggggtggggatagggtggagggatagcatttggagatatacgtaatgttaaatgatgagttaatgggtgcagcacaccaacatgacacatgtatacatatgtaacaaacctgcaaattgtgcacctgcaccctaaaacttaaagtataataataataaaataaaataaaaaaagatatcttcacataaaaaatagaaagaaggtttctgagtaacttctttctgatggctgcattcatctcacagaggtaaacctttcttttcattgagcagactacaaactctgttcttgtaggatcttcaaagtgatttttatgagcactttgagtcctatggtgaaaaatgaaatatcttcacataaaaactagacagaaactttctgagaaacttctttgtgatgtgtacattcatctcacagagttgaacctctcttttgattgagcagtttttaaaccatctttttctggaaactgcaaaggcatatttgtgagtgttttgaggcttacgatgaaaaaggaaatatcttcacataaaaactagacagaagcattttgtgaaacttctttgtgatgtgtgcattcatctcacagagttgaccctttcttttgattgagctgtttggaaacaattttttgtagaatcttcaaagggatgcttgtgagttctttgaggcctatggtgtaaaatgaaatatcttcacataaaaaccagacagaaatctgagaatgggcagactgcctcctcaagtagctccctgatcctcttgtagcctaactgggaggcacccccagcaggggtgtactgacacctcacatggccaggtactcttctgaaacaaaacttccagaggaccgatcaggcaacagcatttgtggtttaccaatatccgctgttcttcagccactgctgctgatacccaggcaaacagggtctagactggacctccaacacaccctaacagacctgaagctgagagccctcactgttagaaggaaaactaacaaacagaaaggacattcacaccaaaaacccatccgtatgtcaccatcctcaaagaccaaaggtagataaaaccacaaagatgggcataaaacagagcagaaaaactggaaactctaaaaatcagagtgcctctcctcatccaaagaacaccgctactcaccagcaatggaacaaagctggacagagaatgactttgacgagttgagagaagaaggcaacagacgatcaaactactctgagctaaagggggaagttcaagcgaatggtgaagagtttaaaaaccttgaaaaaaaattagacgaatggctaactagaataaccaatgcagagaagtccttaaaggaagtgatggagctcaaaaccaaggaagaagaactaattgatgaatgcagaagcctcagtagctgatgcgatcaactggaagaaagggtatcagtgatggaagatgaaatgaatgaaatgaagtgagaggagaagtttagaggaaaaaagaataaaaagaaatgaacaaagcctccaagaaatataggactatgggaaaagatcaaagctacgtctgattggtgtacctgaaagtgactgggagaatggagccaagttggaaaacactctacaggatactatccaggagaacttccccaatctagcatggcaggacaacattcaaattcaggaaatacagagaacaccacaaagatactccaagacacataattgtcagattcaccatagttgaaatgaaggaaaaaaatgttactggcagccagagagaaaggtcgggttacccacaaagcgaagcccatcagactaacagctaatttctcaggagaaactctacaagccagaagagagtgggggccaatattcaacattattaaagaaaagaattttcaacgcagaatttcatatccagccaaactaagcttcataagtgaaggagaaataaaatactttacagacaagcaaatgcggagagattttgtcaccaccaggcctgcccttaaaagagctcctgaaggaagcactaaacatggaaaggaacaaccagtaccagccactgcaaaaacacgccaaattgtaaagaccatcaaggctgggaagaaactgcataaactaatgagctaaataaccagctaacatcataatgacaggatcaaattcacacataacaatagtaaccttaaatgtaaattggctaaatgctccaattcaaagacacagactggcaaattggataaggagtcaagacccatcagtgtgctctattcaggaaacccatctcacgtgcacaaacacatatagactcaaaataaagggatggaggaagatctaccaagaaaatggaaaacaaaaaaaggcagggattacaatcctagtctctgataaaacagattttaagccaacaaagatcaaaacagacaaagaaggacattacataatggtaaagggatcaattcaacaagaagagctaactatcctaaaaatatatgcacccaatacaggagctcccagattcataaagcaaggccttaatgacctacaaagagacttagactcccacacaataataatgggagactttaacaccccactgtcaatattagacagatcaacgagacaaaaagttaacaagtatatccaagaattgaactcagctctggaccaagcagacctaatagatatctacagaactctccaccccaaatcaaaagaatatacattatttcaggaccacaccagatctattccaaaattggccccatagttggaagtaaagcactccttagcaaatgtaaaagaacaaaaattataataaactgtctctcagaccgccttgcaatcaaactagaactcaggatcatcctagccatcagagaaatgcaaatcaaaaccacaatgagataccatctcacaccagttagaatggcgatccttaaaaagtcaggaaacaacaggtgctggagaggatgtgaagaaataggaacacttttacactgttggtgggactgtaaactagttcaaccattgtggaagtcaatgtggcgattcctcagggatctagaactagaaataccatttgacacagccatcccattactgggtatatatccaaaggactataaatcatgctgctataaagacacatgcacacgtatgtttattgcggcactattcacaatagcaaagacttggaaccaacccaaatgtccaacaacgatagactggattaagaaaatgtggcacatatacaccatggaatactatgcagccataaaaaatgatgagctcatgtcctttgtagggacatggatgaaattggaaatcatcactttcagtaaactattgcaagaacaaaaaaccaaacaccacataaactcactcataggtgggaattgaacaattagatcacatggacacaggaaagggaacatcacactctggggactgttgtggggtgcggggaggggggagggattgctttaggagatatatctaatgctaaatgatgagttaatgggtgcagcacaccagcatggcacatgtatacatatgtaactaacctgccgttgtgcacatgtaccctaaaacttaaagtataatagtaataaaataaaataaaaaaatagaaaaaaaccactcaactacagggaaagtgaacaacctgctcctgaatgactactgggtatgtaacgaaatgaaggcagaaataaagatgtcccttgaaaccagcaagaacaaagacacaacgtaccagaatccctgggacacattcaaagcagtgtgtagagggaaatttgtagcactaaatgcccacaagagaaagcagaaaatatccaaaattgacaccttaacatcacaaataaaataactagaaaagcaagagcaaacacactcaaaagctggcagaaggcaagaaataactaagatcagagcagaactgaaggaaatagagaaacaaaaaacccttcaaaaaatcaaagaatccaggaggtggatttttgaaaagatcaacaaaattgatagaccgctagcaagactaataaacaagaaaagagagaagaatcaaataaatgcaataaaaaatgataaaggggatatcaccactgatcccacagaaatacaaactaccatcagagaatactataaacacctctacacaaataaactaggaaatcgagaagaaatggataaatttctcaacacatacatccaagactaaaccaggaagacgttgaatctctgaatagatcaataacaggctctgaaattcaggcaataatccatagcttaccaaccaaaaacactccaggaccagatggattcacagtcgaattctaccagaggtaaaaggaggagctggtaccattccttctgaaattattccaatcaatagaaacagaggaaatcctctctaactcattttatgatgccagtaccatcctcataccaaagcctggcagagacacaacaaaaaaagagaattttagacctatatccttgatgaacattgatgcaaaaatcctcaataaaatactggcaaaccgaatccagcagcacatcaagaagtttatccaccatgaccgagggggcttcatccctgggatgcaaggctggttcaacatacacaaatcaataaacataatctagcatataaacagaaccaaggacaaaaaccacatgattatctctatagatgcagaaaaggcctttgacaaaattcaacaaccttcatgctaagaactctcaataaattagatattgatgagacggatctcaaaataataagagctatctatgaaaaacccacagccaatatcatactgaatggaaaaaaactggaagcattccctttgaaaacttgcacaagacagggatgccctctctcaccactcctgttcaacatagtgttggatgttctagccagggcaatcaggcaggagaaaaaaataaagggtattcaattaggaaaagagagagtcaaattgtccctgcttgcagatgacatgattgtatatctagaaaactccatcgtctcagcccaaaatctccttaagctgataagcaacttcagcaaagtctcaggatacaaaatcaatgtacaaaaatcacaattcttatgcaccaataacagacaaacagagagccaaatcatgagtggactcctattcacaattgcttcaaagagaataaaatacctaggaatgcaacttacaagggccatgaaggacctcttcaaggagaactacaaaccactgctcaatgaaataaaagaggatacaaacaaatggaagaacattccatgcacatggggagaaataatcaatatcgtgaaaatggccatactgcccaaggtaatttgtacatttaatgccatctccatcaaacttccaatgactttcttcacagaattggaaaaaactactttaaagttcatatggaaccaaaaaagagcccgcatcaccaagtcaatcataggccaaaagaacaaagctggaggcatcatgctacctgacttcaaactacactaaagggttatggtaaagaaaacagcatagtactggtactaaaacgaagatatagaccaatggaacagaacagagccctcagaaacaatgccacatatctacaactctctgatctttgacaaacctgacaaaaacaagcaatggggaaaggatttcctttttaataaatggtgctgggaaaactggctagccatatatagaaagctgaaactggatcccttccttaaaccttatagaaaaattaattagacatggattaaagacttaaatgttagacctaaaaccataaaaaccctagaagaaaacgtatgcaatgccattcaggacataggcatgggcaaggagttcatgtctaaaacacaaaaagcaatggcaacaaaagccaaaattgacaaatgggatctaattaaactaaagagcttctgcacagcaaattaaactaccatcagagtgaacaggcaaccaacagaatgggagaaaatttttgcaaactacttatctgacaaagggctaatacccacaatctacaatgaactcaaacaaatttacaagaaaaaaaaaacaaccccatcaaaaagtgggtgaaggataagaacacacacttctcaacagaagacatttatgcatcaaaaaaacacatgaaaaaatgctcatcatcaccggccatcagaaaaaatgcgaatcaaaaccacaatgagataccatctcacaccaattagaatggcaatcattataaagtcaggaaacagcatgtactggagaaaatttggagaaatcggaacactcttacactattggtgggactgtaaaatagttcaaccactatggaagtcagtgtggtgattcctcaaggacctagaacaagaaataccatttgacccagccatcccattgctgggtatatacccaaaggattataaatcatgctgctataaagacacaatcacacatatgtttattgtggcaatattcactatagcaaagacttggaaccaacccaaatgtccaacaatgatagacgggattaagaaaatgtggcacatatacaccatggaatactatgcggccataaaaaatgatgagttcatgtcctttgtagggacatggatgcagctggaaaccatcattctcagcaaactatccaaggacaaaaatccaaacaccacatgttctcactcagaggtgggaattgaataatgagaaaacatagacacagaaagggaaacatcacaaaagggggaatgctgtggggtggggggagtggagagggattgcattaggagatatacctaatgataactgacgagttaatgggtgcagcacaccagcatggcacatgtatacatacgtaacaaacctgcacattgtgcacatgcaccctaaaacttacagtataataataatagaataaaaaaaataaaacttctctctagtttttatgtgaatatacttgtttttcaccataggcctcaaactgctcacaaatattcctttgcagattctacaaaaagactttttccaaactgatcagtcaaatcaaatgttcaacactgtgagatcaatgcacacatcatgaagatgtttctcagaaagcgtctgtctagtttttatgtgaagatatttcctttttcaccacaggcctcaaagtgctcaaaagtatccctttgcagattccacaaagagactgtttccaaactgctcaatgaaaagaatcatttacatctctgaaatgaatgcacacaacacaaagcagtttctctgaaaaacctgtctagtttttatgtgaagatattccctttttcaccataggccacaaagggctcacaaatatccctttgcagattctacaataaaactgtttccaaaatgctcaatcaaaagaaaggttcaactctgtgagatgaatgcacacatcagaaagaagtttctcagaaacttctgtctagtttttatgtgaacatacttcgtttctcaccataagtctcaaagcactcacaaatatccctttgaatattctacaagaacagaggttccaatctgctcgattaaataaatctttccttctgtgagatgaatgtacacatcacaaatcagttcctcagaaaccttctttctagttttaatgtgaagacatttctttttcaccataggcctcaaagctctgacaaatatccctttgcacattctgcaaaaagactgtttcaaagctgctcaatcaaaagaatggatcaacactgtgagatgaatgcacacatcacaaagaagttcctcagaaagatttttctagtttttatgtgaggatattttcctttttgccataggcctcaaaccgctcaaaatatccctttgcagattctaccaaaagactgcttccggactgctcaatcaaaagaaagttcaactctgtgagatgaatgcgcacatcacaaagaaatttctcagagatcttttgtccagtttatgtgatggtatttcctttttcaccataggtctcaaagcactcacaaatatccctctgcagatgctacaaaaagactgtttccaaactgctcaatcaaaagaaaggttcaactttgttagatgaatgctcacatcacaaagaagtttctcagaaagtttctgtctattttttatgtgaagatatgtcctttttcaccataggactcaatgtgctcacaaatatccctttgcagatactacaagaacagattttccaacatgctcaatgaaaagaaacttttacctctgtgagatgaatgcacacatcacaaagcagtttctcagaaaccttctgtctagtttttatgtgaagatacttcccttttcaccataagcctccaatcgctcacacatatccctctgcagattctacaaacaaactctttccaagttgctcaatgaaaagaaagtctcaactctgtgagatgaatgcacacatcacaaagaagtttctcagaaagagtttctcttgtttttatatgaagatacttcctttttcacaataggtctcaaaaagctcccaaatatacctttgcagattctagaaggagacagtttccaaagtgctccatgaaaagaaacggtttcttctgtgatatgaatgcacacatcaaaaagcagtttctcagaaagcttctctgtactttttatgtgaagatatttcctttttcaccatagagctcaatgtgctcccaaatattgctttttagattctacaaaaagtctgtttccaaactcctctatcaaaagaatggttcatctctgtgagatgaatgcacacatcacaaagaactttctcaggaagcttccatctggttttcgtgtgaaggtgtttcctttttcaccatagggctcaatgcgttcctaaatattcctttgtagatcctacaaaaagacactttcaaaactgcccaatcaaaaggatggttcacctctgtgagatgaatgcacacattccacagaagtttctcagaaagcttctctatagtttttatgtgatgatatatactttctcaccataggcctcaaggcactcacaggtatccctatccagatactagaagaacagagtttccaaactgctcaatgaaaagaaacgtttacttctgtgagatgtatgccgaattcacaaagcagtttctcagaaagcttcttcctagttttaatgtcaagatttttttttcaccataggcctcaaagcactctcaaatatccctttgcagattctacaaaaaggcttttgccaaattgcttaatcaaaaggatggtgcaactttgggagatgaatgcaagcttcacaaagaagtttcacagaaaacttcggtctagttctaatgtgagaatatttcctttttcactataggccttaaagcactcaaaatatccctttgcagatcttccaagaactgattttccaaactgctcaatgataagaaacttttacctctgtgaaatgaatgcacacatcacaaagaagtttctcagaaagcttctttctagtttttatgtgaagatatttccttttacaccataggcctcagcgtgctcccaaatatccctttgcagattctacaaaaactgttaccaaactgctcaaacaaaagaatgtcacagctctgtgaggtgaatgcacacatcaaaaagatgtttcacagaaagcttctgtctagtttttatgtgaagatatttcctttctcaccataggactcagtgcgctccccaatatctgtttgcagactctacaaaaagactgcttccgaagtgctcaaagaatggttccactcggtgggatgaatacacacatcacaaggaagtttctcagaaagcttttgcctactctttctgtgaaggtatttcctttttcaacatttacctcaaatcactcacaaatatcccattgcagattggagaagaacagagtttccaaacttctcaatgaaaagaaacgtttgcttctgtgagatgaatacacacatcacaaagcagtttcttagaaagcttctgcctagtttttatgtgaagatatttcctttttcaccatagacttcaatgcactcccaaatatccctttgcagattctacaaagagaatatttgccaactgctcaatcaaaacaatggtccaaatcagtgaaatgaatgctctcatcacaaagaagtctgtcagtaagcttctatctagttcttatgtgaaggtattttctttttctccctagccctcaatgcactcccatatatccctttgcagattctacaaaaagaatgtttccaaactgctaaatcaaagaatggttccactctgtgaggtgaatgcacacatcacaaagaagtttctcagaaaatttctgtcaattttttatgtgaagatatttcctttttcaccataggtcccaaagctctcacaaatatcccttggcagattctacaaaaagacggtttccaaactgctcaatgaaaacaaacatttagatctgtgagatgaatgcacacatcagaaagcagtttctcagaaagcttctttctatttttactgagaagatatttcctttttcaccatagacctcaatgcagtatgaaatatccacttgtagatactacaaaagactgtttccaaactgctcaatcaaaagaatggttcagctatgtgagaagaacgcacacatcaaaaagaagtttctcagaaagttttttcctagttttcatgagaagatatatcctttttcatggtatgccacaaagcgctcacaaatatccctttgcagattctagaagaacagttttcatactgctcaatgaacagaaacatttacctctgtgagttgaatgcacacataacaaagcagtttctctgaaagattctttcaactttttttatgaagaaatttcctttttcatcataggcctcaaagcactcccaaatatccctttgcagattctgcaaaaagactgtttccaaactgctcaatcaaaagaatagttcaactctgtcagatgaatgcacacatcacaaataagtttctcagaaaacttctgtctagttttcctgtgaagatatttcctttttcaccatagacctcaaagtgctcacaaatatccctttgcagattctagaagaatagagtttccaaaatgctcattgaaaagaagttttacctctttcaggtaaatgcacacatcacaaagcagtttctctgaaagcttctttctagcttttatgtgaagatatttcatttttcaccatagacctcaaggtgctcctatatatacttatgaagattctacaaaaagactgtttccaaactgctcaatcaaaagaatgattcaactctgtgagatgaatgcacacatcacaaagaagtttctcagaaaacttctctttagttcttatatgaagatatgtcctttttcaccataggtctcaaagcactcacaaatatccccttgcagattccagaagaatagagtttccaaagtgctccattaaaagaaacgtttacctctgtgatatgaatgcatgcatcaaaaagcagattctcagaaggattctttctactttttatgtgaagatatttcctttttcaccataggcctcaaagcactctcaaatgtccctttgcagattctacaaaaagacttttccaaactgctcaatgaaagaatgattcaactcagtgagatgaatgcagacatcacaaagaagtttctcagaaaacctctgtatagcttttatgtgacaatatttcctttttcatcataagcctcaaagtgctcacaaatatccctgtgcagaatctagaagagcagagttgccaaactgctcaataaaaagaaacgtttacctctgtgaaatgaatgcacacatcacaaaccagtttttcagaaagtttctttctagtttttatgtgaagatatttcctttttcaccatagacctcagtgcgctcccaaatatccctttgcagattctacaacaggacagtttccaaactgctcaaacaatagcatgtcacagctctgtgaggtgaatgcacacatcacaaagatgtttcacagaaagcttctgtctagtttttaggtgaagatatttactttttcaacataggcctcaatgcactccccaatatccctttgaagattctacaaaaagactgcttacaaagtgctcaatcaaaagaattgttcaactctttgagatgaatgcacacatcacaaggaagtttctcagaaagctgctgtctatttatatgtgaaggtatttcctttttcaacatttgcctgaaagcactcccaaatatccctttgcagcttctacaaaaagagtgtttctaaattgtgcaatcaaaaggattgttcaactctgtgagatgaatgcacacatcacaaagaactttctccaaaatcttctgtctagtttttatttgaagatatttcctttttcaccataagcctcaaagtgctcacaaatatccctttgcagattctagaacagtgtgtccaaactgctcaattaaaagaatctttaccactagagatgaatgcacacatcacaaagaagtttctcagaaagcttctttgtagtttttatgtgaaggaatttcgtttttcaccataggcctcagcgtgcccccaaatatccctttttagaatctgcaaaaagactgtttccaaaccgctctatgaaaagaatggttcaactctgtgagacgaatgcacacatcacaaagacgtttcttagaaagtttctgtgtggtttttatggaaagatacttcctttttcaacataggctgcaaagtgctcacaaatatccatttgcagcttctagaagaacagggtttccaaactgttcagtgaaaagaaacctttacctctgcaagtttaatgcacatatcaaaaagaagtttctcagaattcttctttctagtttttatgtgaagatatttcctttttcaccatagggctcaatgcactcccaattatccctttgcagtatctatgaacagactgtttacaaactgctcaatgaaaggaaagtttcaactctgagatgaatgcccacatcacaaagaagtttcccagaaagcttctgtctagtttttgtgtgaagatacttcctttttcaccataggcctcaacgcactcccaaatatcccttttcttgattgtacaaaaagactgtttccaaactgctctatgaaaggaatggttcaactctatgcgatgaatgcacacatcacaaaggagtttctcagaaagcttctttctgctttttatatgaagatatttcctttttcacaataggccgcaaagaactcacaaatatccatttgcagcttctagaagaacagagtttccaaactactcagtgaaaagaaacctttacctctgtgagttgaatgcacacatcacaaacaagtttctcagaatgcttctttctagtttttatgtgaagatatttccttttcacaagagctcaacgtgctcccaagtatccctttgcagtttctatgaacagactgtttccaaactgctcaatgaaaagaaagtttcaactctatgagatgaacacccacatcacaaagtagtttcccagaaagcttctgactagtttttatgtgaggatatttcctttttcaccataggccacaaagggctcaaaaatatgcccttgcaattcaacaaaaagactgtttccaagcagctcaccaaaagaaatgttcaaccctgagatgaatgcacacatcacaaagaagtttctcagaaagcttctttctagtttttatgtgaagatatttcctttttcaccatacacttctaagcactccaaatatccatttgcagattctagaagaacaggttttccaaactgctcaatgaaaacaaacttttacctctgggagatgaatgcacacatcacaaagcagtttctcagaaagtttcttcctagtttttatgtgaagatatttcgtttttcaccataggactccaaatgttcccaaatatccctttgctgattgtacaaaaagactgtattgaaagtgctcaatcaaaagaatagtccaactctgttagaggaatgcacacatcacaaagaagtttctcagaaagattctgtctagtttttatgtgaagatatttcctttttcaatgtaggcctcaaagaactctcaaatattcctttgtagatgctagaaaaacagagtttccaaattgctcaatgaaaacaaatgtttacctctgtgagatgaatgcccagatcacaaagctgtttctcagaaaggttctttctagtttttaagtggagatatttcctttttcagcatagatctcaaagctctgaaaaatatcacttaacagattctacaaaaagactgcttccaaatggctcaatcaaacgaatgcttcaactctgtgagataaatgcacaagtcaaaacgaagtttctctgaaatcttctgtctagtttttatgtgaagatatttcctttttcaccataagcctcaaaacactcacaaatatccctttgcagattccagaagaacagtttccaaactactcaatgaaaaaaaaaaaaatttacctctgtgggatgaatgcacacatcacaaagcactttctcagaaagcttctttctactttttatgtgaagatatttccattttcagtataggcatcaaagcactctaaaatatccgtttgcagattccacaaaaagactgtttccaaactgttcaattaaaagaatgtttcaactgtgtgagatgaatgcactcgtcacaaagaagtttctcagaatggttctgtgtggtgtttttgtgaagatatttcctttgtcaccgtaggcctcaaggcactcacaaatatcccttttcagattctggaagaacagagtttccaaactgctcaatgaaaagaatcatttacctctgtgagatgaatgcacatatcacaaagaagtttctcagaaagcttcttttaagtttttatgtgaagatatttcctttttcaccttaggtctcaaagctctccctgatatcctttggcagaatgtacaaaaatactgtttccaaactgctaaatcaaaagaatggttcaactctatgacacgaatgaacatatgatgaagaagtttctcagaaatcctgtgtctagtttttatgtgaagatatttccttttcaccgcaggcctcaaagcactcaaaaatatccctttgcaaattctagaataacagagtttccaaacttctcaatgaaaagaaagttttacctctgtgagatgagtgcaaacatcctaaaccagtttctcagaaagcttctttctacttttcatatgaagatatttcacttttcaccataggcctcagcacactcccaaatatccctttgcagattctataaaagactgtttccaaactgctcaattgaaagtatggatcaactctgggaaaggaatacaaacatcataaagaagtttctcagaaagcttctgtctggttttcatatgaagatatttctattttcaccatagtcctcaacatgttcccaaatatccccttgcagatgccaaaaacagactgtttccgaattgctctatcaaaagaatggttcagctctgtgtgatgaatgcacacattacaaagaagtttctcagaaagattctgtctagtttttatgtgaagatatttattttttcaccataggtatcaaagcactcacgaaaatccctttgcagattctagaacgacagagtttccaaagtgctgaatgaaaagaaatgtttacctctgtgagataaatgcacacatcatagagaagtttctcagaaagcttgtttctagtttttatgtgaagatatttcctttttcaccataggcctcaaagagctcccaaatatccctttacagattctacaaaaagactgtttccaaactgctcaatcaaaagaatggttgacctccacgagatgaatgcacacatcattaagtagtttctcagaaagcttatttcttgtttttatgtgaagatatttattttttcaccataggtatcaaagtgctcatgaatatctctttgcagattctacaacaacagggtttccggagtgctcaatgaaaaggaatgtttacctctgtgagataaatgcacacatcataaagaagtttctcagaaagcttgtttctagtttttatgtgaagttatttccttttcaccacaggcctcaaagtgcacccaagtatccctttgcaggttctccaaaaacactatttgaaactgcacaatcaaatgaatggttcatctctgtgggatgaatgcacacatcacaaagcagtttctcagaaagctgttttctagtttttacatgaaggtatttcctttttcaccacaggcatctaagcgctccaaaatatcccttttcagattctgcaaaaagactgtttccaaactgttcaatcaaacgaatggttcaagtctgtgagatgaaggcacacatcacaaaggagtttctcagaaagcttctttctagtttttatatgaagatatttcctttttcaccataggcctcaaagtgctcccaaatacacctttgcagattctccaaaaacagtttccaaactgctcaaccaaacgaatggttgatttttgtgaggtgaatgcacacatcacaaagcagtttctcaggaagcttctgtctagtttttatgtgaagatatttcctttttcaccataggcctcaaagtactcacaaatattctttgtagattgtagaagaacaatgtttccaaacgtctcaatgaaaagaaatgtttacctctgtgagatgaatgttcacatcacaaagcagtttcttagaaagcttcttcttgtttgcatgtgaagataattcctttttcaccatagatctcaaagcgctcacaaatatcccttttcagattctagaagaacagagtttccaaactgctcagtcaaaagaattgttcaactctgtgagatgaatgcacacatcacaaagtagtttctcataaacttctgtctaattttgatttgaagatatttcctttttcaccatgagcctcaaagcattcccaaatatccctttgcagtttctacaaaaagactgtgtgcgaactggtcaaacaatagaatggttcaacttggtgagatgaatgcacacatcacaaataagtttctcagaaagcttctgtctagtttttatgtgaaaatatttgctttttcaccatagaaaaacaaaataacttcagataaaaacaagaaataagctttctgagaaactgcattttgatgggtgcatttgtctcacagagtttaacagttcttttgattgagaagttttgaaaagctgtttttttcccattctaggaatggacattcagtagctcctttagtccgttggtgaaaaagtggatttcccagtattaaaactagaaggaagctatctgagaaaccgctttgtgatttttgtattcctttcacatagtgaaatctttctttttattcagctgttaagaaacactgttttttagaatctgcaaagggatatcggaagcacatacaggcctatggtgaaaaagaaaataacttcagataagaactagaaagaaactttctgagaaactgctttgtgatgtgtgcattcatctcacaatgttaaacctttctttgattcagcattttggaaacagtttttctctattcagcaaatggacatttgggagttcattgaggccaatggcaaaaaagcaaatatcgcaggatacaaactagaaagaagctgtctgacaaaccgctttgtgatatgtgcattcttctcacagagataaaccattcttttcattaagccatctggaaacagtttttgtagaatccgtgaagggatatttgggagctctttgaacctattggggaaagagcaaatatccaaggataaaaactagaaggaaattatctgaaaaacctctttgtaatgtgtccgttcatctttcaaagttaaacccttcttttcattcaggagtttggaaacactgtttttgtagagtctgcaaagggatattttggagtgcattgagacctgcagtgaagaagaaaatatcttcagataaacacaagaaagaaactttctgagaaactgctttgtgatgcatgcattcatctcacagacttaaacctttcttttgaatcagcagtttggaaacactgtttttgaagaatctgcaaaaggatatttgggagcacattgagtcctgtggagagaaagaaattatctttacataaaaactagaaataagcttttggagtaactgctctgtggtgtgtgcactaatctcagagataaacctctcttttcattcaactctttggaagcagtgtttttttagaatctgtgaatggacatctgggagtatattgaggctgatggtgaaaaataaaaaatcttcagataaaaactagaaagaacctttctgagaaactgctttgtgatatgtgcattcatctcacagaattaaacttttctttgattctgcagtcttgaaagcctgtttttgtccattcagtgaatcaacatttgggaatacactgtggccaatggtgaaaaagcaaatatcccaggataaaaattagaaggaatttttctgagaaaccaatttctgatgtgtgcattcatcttgcagagttaaaacttccttctcattcagcagtttggaaacactgtttttgtagaatctgcaaagggatatttgggagtgcattaaggcctgtggtgaaaaagacaatatattcgataaaaactgaaaagaagctttataagaaactgcactcctctcacagagttaaagctttcctttgattcagaggtttggaatcactctttttgttgaatctgtgaagtgatatttgggagcgctttgagacctatggtgaaaaacaaaatatctttagataaaaactagaaagaagctttctgagaactcctctgtgatatgtgcattcatctcacagagttaaacattccctttgattcagcagtttggagacactgtttttgtccattctgagaatggacaatttttaagctcattgaggccaatggcaaaaaagtaaatatcactggataaaaactagaaggaaattatctgagaaactactctattatgtgtgcgttcatctcgcagagataaacagttcttttcatcaagcagtttggaaatattgtttttgtagaatcttccaagggatatttgggatatcattaaggccaaagacaaagaaaatatcccgggtaaaaactagaaggaagctgtctgagaaactgctttgtgatgtgtgcattcatctcacagaggtaaacctttcttttaattcagcagtttggaaacactgtttttgtccattctgtgaatgaaccatttggagctcattgagacaaaggaggaaaaaggtaatatcccatgataaaaatgagaaggaatctatttaagaaactgctttgtgatgtgtgcattcatctggccgagttaaaccataagtttcattcagcagtttgaaaacacggttttcgtaaaatctgcaaaatgatatttgagagcactttgaggcctatggtgagaaaaaaacaatgttcaggtaaaaaatagaaaaatgctttctaagaaacagctttgtgatgtgtgcattcatctcacagagttaaacctttattttgattcagcagttttgagacactgtttttttccattctgtgaatggacatttgggagctaattgaggcaagaggggaaaaagctaatatcccatgataaaaactagatagaagctatctgagagactgctttgtgatgtgtgcattcatcttgcagagtgaaatctttcttttcattcagcagtttggaaagacaatttttgtaaatctgtgaagggatatttgggagctcattggtgccaattgcaaaaagctagtatcccaggataaaaatgtgaacgaaggtatctgagaaacggctttgtgatgtgtgcattcttcttgcagactgaaatctttcttttcattcagcagtttggaaacactgtttttgtaaaatctgcaaagggatctttgggagcactatgagtactatggtgaaaaagaaaatatcctcagataaagagtagaaagtagctttctgagaaactgctttgtgatgtgtgcattcatctcatggagttaaaactttattcttattcaggaatttggaaatcctgtttttgcccattctgcaaactcattgatgccaatggtgaaaaagcaaatatctccggataaaaaatggaaggaagctatctcagaaacagctctgtgatgtgtgcattcatctggcagagttaaacctttcttttcattcagtagtttgtaaacactctttttgtagaatctgccaaggtgtatttgggagcactgtgagacctatggtgaaaaataaattatcttcaatgaaaagtagaaagacggtatctgagaaactactatgtgatgcgtgcattcatctaacagagtgaaaactttcttttcattcagcagtttggaaacactgtttttgtagaatctgtgaagggatatttgggagcacattgaggcctatggtcaaagaggaaatatcttgagataaaaggtggaaggaagctttatgagaaactgctttgtgatgtgtgcattcctctcacagagttaaacctttcttttgattcagcagtgtggaaacactgtttttgcccattatgcaaatgtacatttgggagctcataaaggtcagtggcaaaaaagcgaatatcccaggataaaaaccagaaggaagctttctgagaaatcactttgtgatgtgtgcatttgtctcacataatgaaatctttcttttcattctgcagtttggaaaaactatttttgttgaatctgtgaagttgtatttcagagtgcatagggagctattgtgaaaaaatatatacattcagataaaaagttgaggaagcatttgagaaactgcattctgttgtgtgcattcatctcacagagttaaacttttcttttcattcagcagtttggaaatactattttttttccattctctgagtggatatttggaagctctttggggccagtggtgaaaaagctgatatccctggataaaaactagaaggaagctctgtgagaaactgctttgtgatgtgtgcattcatctcacagatttaaaactctcttttgatagaatagtttggaaacactgtttttgtagaatctgtgaagggatatttgaaatcacattgattcctatggtgaaaaaggaaatatcttcacataaaaactagaaaacagctttatgagaaactgctttgtgatgtgtgcattcatctcacagagttaaagctttcttttgtttgagcagtacgaaaaaaatgtttttttggggaacctacaaagggatatttgagagcaccttgagacataaggtgaaaaaggaaatttcttcagataaaaacaggaaagaagctgtctgagaaggtgcttaatgatgtgtgtgttcaactcacaacaataaacttttcttttgattcagcagtttgggaacactgtttatgtagaatcataacagagagggagagcagtgaggcatagggtgaaaaagaaaatatctccatataaaaactagaaagaagctttctgagaaactactttgtgtgtgtgcattcttctcagagagttaaacctttattatgattgagcagtttggaaacactgtttttgtagaatctacgaagggatatttgggaccgcattgaggcctttggtgaaaaaggaaatgtcttcagagaaaaactagaaagaagctttctgataaacggctttgtaatgtgtgcattcatcatacagaggtaaacctttcttttgattgagctgtttggaaacactgtttttgtagaatctgcaaaggcatatttggaagaactttgaggcctatggtgaaaaacggattatcttcagaggcaaacaactagaaagaaactttctgagaaactgctttctgatgtgtgcattcaactcacagagttaaacctttcttttgattgaatagttaggaaacactgtttttgtaggaactgtgaagagatattttggaacacattgaggcctgtggtgaaagaggaaatatcttaagatacaaactagaaagaagatttctgagacagtgctgtatgatgtgagaattcatctctcagaggcaagcctttcttttgattgagcagtttggaaacaatgtttttgtagaatctgtgaagggatattttgaagcgcattgagtcctatgatgaaaacccatatatcttcagataaaacctatagacatgctttctgatgaactgctttgtgatgtgtgcattcacctgacagacttaaaccattcttttgattgagtgcgttgtaatcactctttttgtagaatctgcaaaggggtatttgtgagcacattgaggcatatggaggaaaatgaattattttcagattagaaactacaaagaagttttctgagaaactgctttgtcatgtgtgcattcatctcacagagccaaaactttcttttgatggagcagtttgaaaacactgtttttgtacaaactgcaaaagtatatttgggagagcattgagacctatggtgaaaaaaatatgcttcagataaaacaggaaagaagctttctgagaaactgtttttgatgtgtgtattcatctcacacagctaaacctttctcttcattgagtagtttggaaacactgtttttgtaaaatctgtgagggggatcttggagcacactgaggcctatggtgaaaaaggaaatatcttcagataaaaaataaaaagaagcttcttagaaactgcttagtttgtgtgcattcatctcacacagttaaaactttcttttggttgagcagtttggaaactctgtttttgtagaatctgcaaagggatatatggcagcacattcaggcctctgctgtaaaaggaaataccttcagataaaaactagaaaaaagctttgtgagaaactgctttgtgatgaatgcattcatctcaaagaggtaaatctttcttttcattgagcagttttgcaacactgttttttgggaatctgagaagggatatttgggagcattttaaggcctatggtaaaaaataaaatatcttcagataaaaactagaaggaacctttctgagaaactgctttgtgatgtgtgcattaatctaagagttaaaactcttttttggattgagcagtttggaaaaactttttctatagaatctgtgaaggcatatttaggagcgcttggaggcatatggtgaaaaaggaaatatcttcagagaaaaacaaggaagaagctttctggcaactgctttgtgatgtgtacattcatctcacagagttacaatgttattttgattgagcagtttggaaatactgtttctgttaaattggccaaaggatatttgggagcgcattgaagctgagagttaaaaaggaaacatcttaaaataaaaagtagaaagaaactttctgagaaactgctttgtggtgtatgcattcatctcacagggttaaacctttcttttgattgagcagtttggagaaagtgttttggtagactgtgcgaagggatatttgggagcacttgaggcctatggtgaaaaaggaaatatcttcagatacaaactaaagaaaaagcctttttataaaccactttgggatgtgtgcattcttctcacagagttaaacatttttattaattgtgcagtctggaaacactgtttttgttgaatctatgagttgacatatgggagtgcattgaagccaaacgtgaaaaagtaaatatattggaagaaaaactagaaagaagctatctgagaaactgctttgtgatgtgtgcattcgtctcaaagagttaaacctttcttttgattgagaagttcagaaacagtttttgtacaatctgcaaagggatatttggggagagtttgaagcctatggtgaaaaaggaaatatcttcagataaaaactagaaagaagctttctgagaaactgtatgtgatgagtgcattcatctaacaggtttaaaactttctttagattgtgcagtttggaaaccctgtttttgtagaatctatgaagtggtatttgggagtacattgaggcctttggtgaaaaaggaaatatgttcagataaatactagaaagaagattttcagcaactgctttgtggtttgtgcattcttctcacagagttaaacgtttcttttgattgagcagtttggaaacactgttttggtagaatctaggaagggatatatcagagcacattgaggcctgggaagaaataggaaatatcctcagagaaaaattagaaagatttctgagaacctgctttgtgatgtgtgcattcatctcacagagttaaaatttcttttgattgagcatgttggcaacagtgtgtttgtagaatctcagaagggatattgagagcagttttagacctatgtttaaaaatgaaatatcttcagataaaaaataaaaagaagctttctgggaaactgctttttgatgtgtgcattcatctcacagagttaaacctttcttttgattgagcagtttggaaacactgttttggtagaatctatgaagggatatttcggagtgcacagatgcctatggtgagaaagaaaatatcttcaggtaaaaattagaaagatttctgagaaacttttgtctgatatatgtatttatctcacaaagttagacatttcttttgattgaccaggttggaaacaccattttcatccattctgtgaatgcaaatttggaagctcattgaggccgatcatggaaaagtgaatatcccaggataaaaattagaatgaagtaagttgagaaatggtattgtgatgtgtgcattcatgtctcacagttacacagttattttcattcagcagttttgaaacactttttttagaatctgcaaagggatatttgggagtgcattttggactgtgacaaaaagtaatgtatcttcagataaaatcttggaggaagctttctgataaactgctttgtgatgtgtgcattcatctctcagagttaaacctttcttttgattcagcagtttgaaaacacagtttttgtagaatatagaagggatattttggagcaaattgaggcctgtggtgaaaataatatttcttcagataaaaagtaggaggaagctatctaagaaacagctttgtgatgtgtgctttcatctcatagagttaaacttaccatttcattcaacagtttggaaacactgttttttttagaatctgcgaattgacatttgggagtgcattgaggccaatggtgaaaaataaaaaatcttcagataaaaactagaaaggagctttctgagaaattgctttgtgatatgtggattcatctcacagagttaaacttttctttgattcagcagttttgaaagcctgtttttgtccattcagtgaatcaatatttgggaatgcactgtggccaatggtgaaaaagcaaatatcccaggataaaaactagaaggaatttatctgagaaaccactttctgatgtttgcattcatcttgcagagttaaacctttcttttcattcagtagtttggaaacactgtttttgtagaatctgtgaagggatatttgggagtgcattaaggcctgtggtgaaaaagaaaatatattcagacaaaaaattgaaaagaagatttataagaaactgctttcatctcacagagttaaacctttccttagatttaaaggtgtggaatcacggtttttatgaatctgtgaagtgatatttgggaccgctttgaggcctatggtgaaaaagaaaatatcttcgtataaaaactagaaggaagcttttgagcactgctttgtgatgtgtgcattcatctcacagagttaaaccttccctttgatttagcagtttggagacagtgtttttgtccattctgagaaaggacatttggaagcttattgaggccaatggcaaaaaaagtgaatatttctgggtaaaaactagaaggaaattatctcagaaactgctctatgatgtatgcattcacctcacagagataaaccattcttttcattaagtagtttgggaacacatttttgtagaatcttccaagggatatttgagagatcatcagggccacaggcaaagaagtgaatatcccagggtaaaaactagaagaaagctatctgagaaaccacattgtaatgtgcacattcatctcacagacttaaaccattcttttgacttggcagtttggaaacactgtttttgtccattccgcaaatggacatttgggagctccttgagtccaaaggcgaaaaagggaatactccaggataaaactgacaaggaagctgtctgacaaaccgccttgtgatttgtgcattcatcttggagagttaaacatttcttttcatgcagtagtttggaaacactctttttctagaatctgcaaacagatatttgggagcgcattgagaactacggtgtaaaaggaaatatattcagtaaaaaactagaaagaagatttctgagaaattgctttttgctatgtgcattcatgtcacagagttaaagctttcttttgattgagcagtttggaatcattgtttttgttgaatctgcagtgatatatttgggaccacactgaagcctatggtgaaaaagaaaatatcttcacaggaaaaattggaaagaagctttctgagaaaccattttgtgttgcatgcattcttctcaaagagttcaaccattcttttgattgagcagtttggaaacactgcttttgtagaatatgcaaagggatatttgggggcgcattgaggccaatggtgaaaaatgaaatatcttcagataaaagctagaaagaagttttctggtaaactgctttgtgatgtgtgcattcatctcatataggtaaacctttcttttgattgagcagtttggaaacactgttttggtagaatctgtgaagggttattagggattgcattggggactgtggtgaaaaaggaaatatcttcagataaaaactagaaagaagctttctgagaaactgctttgagatgtgggcattcgtctcacaacgttaaaactttcttttgattgtgtagtttgtaaacattgtttttgtagaatctacgaagggatatttgggagcacataaaagcatatggtgaaaaaggaaatatcttcagataaaaactagacagaagctttctgagaaaccattttgtgatgtgacattcttctcatagagttaaaccattcttttggttgagtagtttggaaactgttttttttagaatctgtgaagggatatttgggagccaattgaggccaagggtgaaaaaggaaatatcttcacataaaaactagaaagaagttttctgagaaactgctttgtgatgtgtccattcatctcacagaattaaaacttccttttgaatgggcagtttggaaacacagtttttgatgtatctgtgaagggatatttgggagcgcatcaagatctatggttaaaaaggaaatatcttgggataaaaagtagaaagaagctttctcagaaactgcttcgtgatgtctgcattcttctcacagagttaaacctttcttttgattgagcagtttggaaacactgtttttgtagaatctgtgaagtgatatttgggagggcattcaggcctatggtgaaaaaggaaatatcttcagataaaaactagaaagaaacattctgagaaactgctttctgacgagggcattcatctcacacagttaaatctttcttttggatgagtagtttggaaacactgttttggtaggatctgagaagagatacttgggagcacattgaggcctatgctgaaaaaggaaatatcttcatataaaaactaaaaagaaactctctaggaaactgctttgtgatttgtgcattcatctcacagagttaaatctttcttttcattttgcagtttggcaacactgtttttattgaatctgtgaagggacaattgggagcacattgaggtctatggtcaaaaaggaaatatcttcagataaatactagaaagaagttttctcagaattggctttgtgatgtgggcattctcctgacagagttaaacttttcttttgatttagcagtttggcatcaacgtttttgtagaatctgagaaggggtgtttgggagcactttgaggcctacggttaaaaagggaacatcttcagataaaaactagaaagaagatttctgggaaactgctttatgatttctaccttcatctctcagagttaaacctttcttttgattgagcagtttggaaacactctttaggtaggatctgcaaagagatatttcagagcgagttgaggcctatggtgaaaaaggaaatatattcagaaaaaaactagaaggaagtttctcagaaaccgctttgtgttcagggcgttcttctcacagagttaacctttattttgattgagcagtctggaaacactgtttttgtagaatctacaaagggatatattgtagtgctttgtggtctacagtaaaaaaagaaatatcttcagataaaaactagaaagaaggtttctgagaaactgctctgtgaagtgtacattcttctcacacagttaaacatttccattgatcaagcagcctggaaagattgttttggtagaatctatgaagggatatatgggagtgtattgaggcctatggtgaaaaagaaaatatcttcagagaaaaactagaaagaagctttctgagaaactgctttgtgatgtgtgcattcatctcacagagtgaaacctctcttttgactgagcagtttggcaacagtgtgattgtagaatctgagaagggatgtttgggagtgcttcagggcctatggtgtaaaaggaagtatcttcagataaaaactagaaagaagctttctgggaaactgctttgtgatgtgttcattcatcccacagagataaacctttcttttgattgtgcagtttggcaacactgtttttgttgcatctgtaaaaggacacttggaagtgcattggggtctatggtgaaaaaggtaatatcttcagataaatatgaagcagtgtgggaaatctatttttatggaatctgtgaagggacatttgggagtgtattgagtcctatggtgaaaaaggaaatatcttcagataaaaactagaaagatgctttctcaaaaacagctttgtgatgggtgcattcttctcacagagttaaatctttcttttcattgagcagtttggaaacactgttttggtagactctgcgaagggatattttgtagagctttgaggcctatggtgaaaaaggagataacttcagattaaattagaaagaagctttctcagaaacagttttgtgatgtgtgcattcttctcacagagttaaatatttcctttcattaagcagtctggaaacactgttctttttttttaaatctaggaagggatatatgggagcacattgaggtcagtggtgaaaaaggaaatatcttctgagaaaaactaggcagaagcttcctgagaaactgctttgtgatgagtgcattcgtctcacagaattcatactttcttttgattgagcagtttggcaacactctttttgtagaatctgagaaggtatatttgggagtggtttgaggcctatggtgaaaaaggaaatatcttcagaggaaaactagaaagaagctttctcagtaaccaccttcagatgtgtgcattcatctcagagagttaaaccattctttgagcagtttggaaacactgttttcgtaggatgtatgaagggatatttgggagcgcttacaggcctatggtgaaaaataaatatcttcagataaaaactagaaagaagctttgtgagaaacactactttgtgatgagtaagttcatctcacagagttaaaattttcttttgatttttcagtctgacaacggtgtttttaaaaatctgagaagggatatttgggagtgctttgaggcctatggtgaagaacaatatatcttcagatataaaatagaaagaaacattctgggaatctgctttgtgatgggtgcattcttctcacagagttaaacctttcttttgattgagcagtttggaaacactgtttttttaaaatatagaaagggataaattggagcacactgaggccagtggtgaaaaaggaaatatcttcagatagaaactagaaagcagctttctgagaaaatggtttgtgatgtgtgcattcatctcatagagtttaaccatacttttcattgagaagtttgaaaacactgttttggtagaatctgcaaagggatattaaggatcgcttataggcctctggtgaaaaattaaatatcatcagataaaaactagaaagatgctttctgataaactggtttgtgacgagtgcactcatctcaaagagttaaatgtttcgtttgattgagcagtttggaaacagggactttggagaatctagaaggcatatttggaagcactttgaggcctaaggtcaaaaaagaaatatcttcagataaaaactagaaagaagctttctgggaatctgtttgtgatgtgtgcatttatgtcacagtgttaaaactgtcttttgattcagcaggatggaaagactgttttggaagaatctgcgagacacatttgggatcactttgagacatctgttgagaaaggaaatatcttcaggtaaaaactagaaagaagctttctgggaaactgctttgtgatgtgcatattcttcccacagagtaaaacctttctttgattgaacagtctggaaacactgtttttgtagagtctatgcagggatatacgggtgcacattgaggactatggtgaaaaaggaaatatcttccaagaaatactagacagaaaatttctgagaaactgctttgtgatgtgtgcattcatctcacagagttaaacctttcttttgattgaggagtttccaaaccccgttttggtactatctgtgaagggatatttgggagggcattcagacctatggtgaaaaagggaataccttcacataaatagtagaaagaagctttctcagaaaacgctttgtaatgtatgcattcttcttacagagtttaaccattcttttgagcaatttggagaccctgtgtttgtggagtctgtgaaggtatatataagagcgcattgaggcctatgatgaaaaagaaaatatcttcacagaaaaagtagaaagaagctttttgagaaacttctttgtgatgtgtgtattcttctcacagaggtaaaactttcttttcattgagcagtttggaatcactgttttggtagaatctccgaagggatatttgggagtgcattcaggcctatggtgaaaaaggaaatatcatcagagaaaaattagaaagaagctttctgagaaacccctttgtgatgtgtgcatttttctcccagagttaaacctttcttttcatttagcagtctggaagcactgtttttatagaatcttggaagggatatatgagagtgcattgaggcctatggtgaaaaaagaaatatctttagataaaaactagaaagaagctttctgagaaactgctttgtgatgagtgcattcatctcacagagttaaaacttccttttgattgaacagtttggcaacactctttttgtagaatctgagaagtgatattgggagcaattagaggcttatagtgaaaaagggaatatcttaggataaaaaatagaaaatgaattttgagaaactggtttatgatgtgtgtattcatttcacagagttaaacctttcttctcattgaggagtttggcaacactgtttttgaaagatctgtgtgggtatatttgggagcgctttgaggcctatggtgaaaaaggaaatatcttcagactaaaactagaaagaagctttctctgaaactgccttctgatgtgtgcattcatttcacagagttgaagcattcttttgattgagcagtttggaaacactgttttggtaggatctgcgaagggatatttgggagcacttacgggtctatggagaaaaataccttcagataaaaactagaaagaatctttgcgaaaaactgttgtgatatgtaagttcatctcacagagttaaacttgttattgtgcagtttggcaacagtgcttttgtaaaatctgagaaggatacttgggactgctttgatgtctatggtgaaaaacaaaatatcttcagatataaaatagaacttttctaggagaatgctttgtgatgtacacattcttctcacagggttaaacctttcttttctttgagcatatttgaaacactgttcttggagaaaatgccatgggatatatgggaacgcattgaggcctagggagaaaaaggaaatatcttcagataaaaactataaagaatctttctgagaaaccactttgtgatgtgtgcattcatctcacacttataccattcttttcattgagcagtttggaaacactgttttggtaggatctgcaaagggatatttgggagcgatttcaggcctctggtgaaaaataaaatatctctggttaaaaactagaaagaatcgttctgagaaactgatttgtgaggagtacattcaccacaaacagttaattgtttattttgattgagcagtttggcaacagtgcttttgtaggatctgtgaaggcatatttgggtgcgctttgaggccaatggtcaaaaaagaaatatcttcagataaaaattagaaagaaactttctgggaacgtttttgtgatatgtgcattcatctcacagagatcaaattttcttttgattaagcagtctggaaacactctttgtgtagcatctacccagggatatatcggaacacattgaggcctatggtgaaaaaggaaatatcttccgagaaaaactagacagaagctttctggtcaaattctttgtgatgtgtacattcatctcacagagttaaacctttttttgattgagcagtttgccaatactctttttgtaaaatctgagaagggatatttcggagggctttgagtgaaaaaggaaacgtcttgagataataagtagaaagaagctttctgggaaactgcttttgatgtattcattcttctcacagagttaaacctttcttttgattgagcaatttggaaaaactgttgttggagaaaatgcaaagggatatatgggcacgcattgaggcctatggtgaaaaatgaaatatcttcagatgaaaactataaagaagctatctgagaaaccacgttgggatgtgtgcattcatcttacagagttaaatcattcttttcattgagaagtttggaaacactgttttggtagaatctgtgaagggatatttgggagcactttcaggtgactggtgaaaaattaaataccttcagataaaaactagaaagaagctttctgagaatccaccttctgaatagtatgttcatctaaaaagttaaacatttattttgattgagctgtttggcaacagtgctttcatagaatctgcaaagacatatttgtgagtacttagaggccaatggtcaaagaataaatatcttcagataaaaactagaaagaagctttgtgggaactgttttgtgatatgtgctttaatctcacagagctaaacagtcttttgattgagcattgtggaaacgctcttttggtagaatttgcaaagacatacatgggatcacatcgaggagtatggtgagaaaggaaatatcttcagataaaaactagaaagaagttttctgggaaactgctttgtgatgtgtgcactcatcaaacagagttaaacctttcttttgcttgagcaatttggaaacactgttttggaagtatctgtgaagggatatttgagagcccattgagggctttggtgaaaaggacatatgttcagataaatacaagaaagaagctttctcagaaatggctttctgaagtgtgcattcttctcacaaaattaaaaatttcttttgattgagtagtctggaaacattgtttgcatagagtctactaagggatatataggagggcattgcggcttacggtataaaaggaaatatcttcagagaaaaactagacagaagctttctgagaaactgctttgggttgtgtccattcatctcacagagataaacctttcttttgattcagtagtttgcaaaaactcttttggtagtatctgccaagtgatattttggagcccattcaggccaatggtgaaaaaggaaatatcttcagataaaaacaagaaagacaccttctgagaaacagctgtgtgttgaggacattaatctcacacagttgaaagtttctttagatacactagtgtggaaacactgttttggcagaatctgtgaagagatatttcggagtgaattgaagcctactgtaaaaaagggaatatcttcagataaatactagaaagaagctttcgcagaaactgctttgtgatgtgtgcattcttctcacagagataaacctttattttggttgagcagtttacaaaccctgttttggttttatctgcaaagtgatatttgggaacgcatttaggccaatgctgaaaaaggaaatatcttcagagaaaaactgaaaagaagctttctgagaaactgctttgtgatgtgtgcattcaactcacagagttaaacgtttcttttgattgagcagtctggaaatgctgttttggtagaatctgcgaagggatatttgggagcacattcaggacaatggtgaaagaggaaacatcatcagagaaaaagtaaaaagaagctttctgagaaacttctttgtgaagtatgcattcttctcacagagttaaacctttcttttcattgagcagtctggaaccattgttttttttagaatctaggcagggatatatgagagcacattgaggcttgtagtgaaaaaggaagtgtcttcagataaaaactagagacaagctttctgagaaactgctttgtgctgagtgcattcatctcacagaattaaacctttctttgattgaacagtttggcaacactctttttgtagaatctgagaagggatatttgtgagcactttgaggcctatagtgaaaacgggaaggtcttcagataaaaagtagaaataagatttctgggcaaccgctttatgatgtgtgcattcatctcacagagtcaaacctttcttttgattgagcattttgccaatactctttatgtagaatctgagaagggttacttgtgagcactttgtggcctatagtgaaaaagggaacatcttcagataaaaagtagaaagaagctttctaagcaactgctttctaatgtctgcattcacctcacagagttaaactttcttttgattgaacagtttggaaacactctttttgtagactctgagaagggatatttgggagcattatgaggcctatagtgaaaaaggaaatatcttcagatgaaagctagaaataagccttctcataaaccacctttttatgtgtgctttcttctcacagagttaaagaattcttttgattgagtagtatggaaactctgttttgataggatctgcgaagggacatttgtgggcactttcaggcctatagggaaatgttaaatattttcagataaaaactagaaagaagctttgtgagaaactgctttgtgattattaagttcatctcacagaggtaaaaccttaattgtgcagtttggcaacagagctgttgtaaaatctgagaagggctatttgggaacgctttgaggcctatgttgaaaaacaaaatatcttcagatataaactagaaagaagctttctgagaatctattttgtgatgtatgcattcttctcacagagttaaacctttcttttgattgagcattttggaaacactgtttttggagaatctgccaagggatgtatgagagctcattgaggcttatagtgaaaaaggaaatatcttcagataaaaactagacagaagtgtctgttcatgtctttcgcccactttttgtggaagtcagtgtggtgattcctcagggatctagaattagaaataccatttgacccagccatcccattactgggtataaacccaaaggattataaatcatgctgctataaagacatatatacacgtatgattagagcggcactattcacaatagcaaagacttggaaccaacccaaatgtccaacaatgatagactggattaagaaaatgtggcacatatacaccatggaatactacgcagccataaaaaatgatgagttcatgtcctttgtagggacatggatgaaattggaaatcatcattctcagtaaactatcgcaggaacaaaaaaccaaacaccgcatattctcactcataggtgggaactgaacaacgagaacacatggacacaggaaggggaacatcacacactggagactgttgtggcgggggagggggaaggataacattgggagaaatacctaatgctagatgacgagatagtgggtgcagcacaacagcatggcacttgtatacatatgtaactaacctgcacattgtgcacatgtaccctaaaacttaaagtataataataataaataataaataaatgaaaataaagttatggccattacagaataagaaataaacattaaaaaaactagaaagaaaccatcaaagaaactgctttgtgatatgtacattcacctcacagtagtaaactattcttttcattaagcagtttggaaacactgttttggtagaatctgcaaagggatatttgggagcaactagagtcctatgttaaaaaaggaatgatcgtctgagaaaaagtagaaagaagctttgtgagaaactcctttataatgtgtacatacttctcacagagttaaagctttcattctattgagcagcctggaacttctttttccttagaatctaggaagggatatatggagcatattgaggccaacagtgaaaaaggaaatatcttcagagaaaaacgagaaagaagctttctgagaaactgttttgtgatgtgtgcattagtctcacagagttaaacatttattttgattgagcagtttggaaacactgttttgatagaatctgcaaagagatatttgggagcacattgagacctctggtgaaaaagaaaacatcatcagagaaaaagtagaaagaaaatttctcagaaattgctttgtgatgtgtgcattcttctcacagagttagacctttcttttcattgagtagcctggaaccactgtttttttcagaatctaagaagggatatatgacagcacattgaggcttataatggaaaaggaaatatattcagataaaaactacaatgaaattttctgagaaacttctttctgctgagtgcatttatcacacacaatgaaacctttcttttgaatgagcaatttgtcaacactctttttgtagaaaccgagaagggatatttgtgagtgctttgaggccaataatgaaaaagggaatgtcttcagataaaaactagaaagaaactttctgggaaactgctttctgatgtgtgcattctactcacagaggtaaacctttcttttgattgagcaatgtggaaacactgttgttggagaaactgcaagggatatacgggagctcattgagggctatggtgaaaaaggaaacatcttccaataaaaagtagaaagaagcattctaagaaattgcttcatgatgtgtgcattaatctcacagagttaaacgtttcttttgattgagaagtttggaaacactgttttggtaggatcagtgaagggatatttgggaccgccttgaggcctgtggtaaaaagcgaaacatcatcagagaaaaagtagaaagaagatttctgagaaactcctttgtgatgtgtgcatacatctcaaagagttataccttatatcttattgagcagtctataaactttgtttttttatggactattggttttttatttcattttactttattttattattatactttaagttttagggtacacgtgcacaaagtgcaggtttgttacatatgtatacatgtgccatcttggtgtgctgcatccattaactcgtcatttagcattaggtatatatcaaaatgctatccttccccctcctcccaccccacaacagtcaccagagtgtgatgttccctgtcctgtgtccatgtgttctcattgttcaattcccacctatgagtgagaacatgcggtgtttggttttttgtccttgtgagagtttgctgagaatgatggtttccagtttcatctgtgtccctacaaagacataaactcatcattttttatggctgcatagtattccatggtgtatatgtgccacattttcttaatccagtctatcgttgttggacatttgggttggttccaagtctttgctattgtgaatagtgccacaataaacatatgtgtgcctgtgtctttatagcagaatgatttataatcctttgggtatatacccggtaatgggatggctgggtcaaatggtatttctaattctagatccctgaggaatcgccacactgacttccacaatggttgaactagtttacagtcccaccaacagtgtaaaagtgttcctatttctctacatcctctccagcacctgttgtttcctgactttttaatgaccaccattctaactggtgtgagatggtatctcattgtggtttagatttgcatttctctgatgtacagtgatgatgagcattttttcgtgtgttttttggctgcataaatgtcttcttttgagaagtgtctggtcatatcctttgccagttttttgatggggttgtttgtttttttcttgtaaatttgtttgagttcattgtagattctggacattagcactttttcagatgagtaggttgtgaaaattatctcccattttgtaggttgcctgttcaccctgaaggtagtttcttttgataatgggagactttaacaccccactgtcaacattagacagatcagggagacagaaagttaacaaggatacccaggaattaaactcagctttgcaccaagcagacctaatagacatctatggaactctctacctcaaatcaacagaatatacatttttttcagcaccacaccacacctattacaaaattgaccacctagaaagaagtaaagcacacttcagcaaatgtaaaagaacagaaattataacaaactgtctctcagaccacagtgcaatcaaactagaactcaggattaagaaaatcactcaaaactgctcaactacatggaaactgaacaacttgctcctgaatgactactgggtacataacgaaatgaaggcagaaaaaaagatgctctttgaaaccaatgagaatgaagacacaacacatcagaatctctgggacacattcaaagcagtgtgtagagggaaatttatagcccacaagagaatgcaggaaagatccaaaattgacaccctaacctcacaattaaaagaactagaaaagcaagagcaaacacattcaaaagctagcagaaggcaagagataactaaaatcagagcagaactgaagaaaacagagacacaaaaaacccttcaaaaaaataatgaatccaggagctggttttttgaaaagttcaacaaaattgatagacaactagtaagactaataaagaagaaaagagagaagaatcaaatagatgcagtaaaaaatgataaaggggatatcaccaccgatcccacagaaatacaaattaccatcagagaatactataaacagctctatgcaaataaactagaaaatctagaagaaatgaataaattcctcaacacatacatccacccaagactaatccaggaagaagttgaatctctgaatagatcaataacaggctctgaaattaaggcaatagtcaatagcttaccaaccaaaaaaagtccaggaccagatggattcacagccgaattctaccagaggtacaaagaggagctggtaccattccttctgaaatgattccaatcaatagaaagagaagaaatcctcccaaactcattttatgaggccagcatcatcctgataccaaagcctggcagagacacaacaaaaaaagagaattttagaccaatatccttgatgaacattgatgcaaaaatcctcaataaaatactggcaaactgaacccagcaacacatcaaaaagattatccaccatgatcaagtgggcttcatccctgggatgcaaggctggttcaacatatgcaaatcaataaatgtaatccagtatataaacaaaaccaaagaaaaaaaccacatgattatctcaatagatgcagaaaaggcttttgacaaaattcagcaacgcttcatgctaaaactctcaataaattaggtattgatgggacgtatctcaaaataataagagctgtctatgacaatcccacagccaatatcatactgaatgggcaaaaactggaagtattccctttgaaaactggcacaagacagggatgctctctcaccactcctatttaacatagtgttggaagtgttggccagggcaattaggcaggagaaggaaataaagggtattcagttaggaaaagaggaagtcaaattttccctgtttgcagatgacatgattgtagatctaggaaaccccatcatctcagcccaaaatctcgttaagctgataagcaacttcagcaaagtctttgcatacaaaatcaatgtgtgaaaatcacaagcattcttattcaccaataacagacagagagccaaaccatgagtgaactcccattcactattgcttcaaagaaaataaaatacctaggaatccaacttacaagggaggtgaaggacctcttcaaggagaactacaaaccactgctcaatgaaataaaagaggataaaaagaaatggaagaatattccatgctcatgggtaggaagaatcaatatcgtgaaaatggccatactgcccaaggtaatttatagactcaatgccatccccatcaagctaccaatgactttcttcacacaattggaaaaaactactttaaagttcatatggaaccaaaaaagagccctcatcaccaagtcaatcctaagccaaaagaacaaagccagaggcatcacgctacctgacttcaaactatactacaaggctacagtaaccaaaacagcatagtactggtaccaaaacagcatagtactggtaccaaaacagagatatagatcaatggaacagaacagagccctcagaagtaatgccgcatatctacaaccatctgatctttgacaaacctgacaaaaacaagcaatggggaaaggattccagatttaataaatggtgctgggaaaactggctaaccatatgcagaaagctgaaactggatcccttccttacaccttatacacaaattaattcaagatgaattaaagacttacatgttagacctaaaaccataaaaatcctagaagaaaacctaggcaataccattcaggacatagtcatggacaaggacttcatgtctaaaacaccaaaatcaatggcaacaaaagccaaaattgacaaatgggatctagtgaaactttgttttcttggaatctaggaagagatatattggagctcattgaggccaacggtgaaaaaggaaatatcttcacataaaaactagaaggaagctttctgggaaactgctttgtgctgagtgcattaatctcacagagtgaaacctttctttttaatgagaagtttggcagcactctttttgtgcactctgagaagggatatttgggagtcctttgaggcctatagtgaaaatggaacgtcttcagataaaaaaacgaaaagctttctgggactgcattgtgaagagtaagttcatcacaaagagttaaacatttcttctgattgtgcagtttggcaaccgtgcttttgtaaaatctgagaagggttatttgggagcactttgaggcctatgttgaaaaacataatatcttcaggtataaagtagaaagacactttctgggaatctgtttcatgatgtgtgcattcttctcacacaggtaaacctttcttttgattgagcagtttggaaacactgttgttggagaatctgagaaggggtattttggagcactttgaggcctatagtgaaaaacggaacatcttcatatagaaactagaaagaatctttctgggaatctgttttgtgaagtctgcattcttctctgagaattaaaccttcctttggattgagcagtttggaagccctgttttggttgtatctgtgaagtgattcttgggagcacattcaggccgacggtgaaaaaggaaatatcttcagagaaaaatgagacaaaagtttgctgagaaacttctttgtgatgtgtgcattcatctcactgagttaaacgtttcttttgattgaggagtttgcaaacactgttttggtagaatctgctaagggatatttggaagtgcattgaggcctatggtgaaaaaggaaacatcatcagaggaaaagtagaaaaaagctttctgagaaactcctttgtgatgtgtgcattcttctcacagagttaaacctttcttttcattgagcattctggaaccactattttttttagaatctaggaagtgatatatgacagtgcattgaggcctataatgaaaaaggaaatatcttcagataaaaactagaaagaagcttcttgagaaaatgctttgtgctgagtgcactcatctcacagagctaaaagttttttctcattgagcagtttggcaacactctttttgtaggatctgagaagggatatttgtgagcactttgaggcctatagtgaacaagggaacatcttcagataaaaactagaaagaagatttctgggcaactgctttatgatgcatgcattcatctgacagaggtaaaccttttttttgattgagcagtttggaaacactgttgttggagaatctgccaagggatatatgggagctcattgagggtgacggtgaaaaaggaaatatcttctgatgaaaagaagagagaaggtttctaagaaactgcttcatgatgtgtgcattcacgtcatagagttaaacgtttcttttgattgagcagtctggaaatactgttttggtaggatctgcaaagggatgtttgggagtgtgttgaggcctatggtaaaaaaggaaacatctcagagaaaaagtagaaagaagctgtctgagaaactcctttgtgatgtgtgcatacttctcacagagttaaatcttgcatttcattgagcaatctagaacctctgtttccttagaatctaggaagggagctccatatccatatgggagcacattgaggacaaaggttaaaaaggaaatatcttcagataaaagctagaaaaaagctttccgagaaactgctttgtgctgagtgcattcatcccacagagttaaacctttcttttgatagagcagtttggcaacactttttctgtagactctgagaagggataattgggagcactttgaagcctattgtaaaaaagggaacgtcttcagataaacactagaaagaacctttctgggaaactgctttgtgatatgtgcattcttctcagagaggaaaacctttcttttgattgagcagtttgcaaaccctattttggttgtatctgcgaagtgatatttgggagctcattcagtcctaaggtgaaaaaggaaatatcttcagagaaaagttagaaagaagctttctgagaaactgctttgtgatgtgtgcattcgtctcacagagttaaaagtttcttttgattgagcagtttggaaacactgttttggtagaatctgcgaaggggtatttgggagcaccttgaggtctatggtaaaaaaggaaacatcatcagagaaaaagtagaaagaagctttttgagaaacttcttggtgatgcaggcattattctcacagagttaaaccatgcttttcattgatccgtctggaaacactgttcttttagaatctaggaaaggatatttgagagtgcattgaggcctatagtgaaaaaggaaatatcttcagttaaaaactagaaagaagctttctggaaaactgctttttgctgagtgcattcacctcacaaaatgaaacctttcttttgaatgagcagtttggcgacactctttttgtagactccaagaagggatatttgtgagcactttgaagcctctagtgaaaaagggaacatcttcagataagtaatggaaagaagttttctgggaaactgctttgtgaagagtaagttcatctcacagagttaaacctttattttgattgtggagtttgacaacagtgcttttgtaatatctgagaaggcatatttgggatcactttgaggcctatattgaaaaacttagtatcttcaggtataaagaataaagaagctttctgggaatctgcttcatgatgtgtgcattcttctcacacagttaaaccttttgtttgattgagcagtttggaaacactgttggataatctgccaaggtctatggtgaaaaaggaaatatcttcaaatcaaaactaaaaagaagatttctgagaaacttctttgtgatgtgtgcattcttgtcccagagttaaacttttcttttcattcagcagtctggaaacactgtctttttagaatctaagaacggatatatgagagtgcactgaggcctgtagtgaaaaaggaaatacctttagataaaagctagaaagacactttctgagaaactgcatggcactgagtgcattcatctcacacagttaaaactttcttgtgattgagtagtttgtcaacacagtttttttagatgctgtgaagggatatttggaagtgctttgaggcctatggtgaaaaaggaaatatcttcagatgaaaactagaaagaagccttttcagaaaccacctctggatgtgtgcattcatctcacagagttaaagcattcttttgattgagcagtttggaaacactgttttggtaggatctgcaaagggatattttggagcacttacagacctatagtgaaaagtcaaatatcttcagataaaaactagaaagaaggtttgtgagaaactgctttgtgatgagtaagttcatctcacagaggtaaacttttcctttgattgtgaagtttggcaactgtactttggtaaaatctgagatgggaaactgggagcactttgaggccagtgttgaaaaacaaaatatctttatatataaactagaaagctttctgggaatctgctttgtgatatattcgttcttctcacagagttaaaccttcctgttgattgattgagcagtttggaaacgctattgttggaggatctgccaaggaatatatgggagctcattgaggcctatggtgaaaaaggaaatatcttcagttaaaaaataggaagaagctttctaagaaaccgctttgtgacgtgtgcattcacctcatagagttaaaccattcttttcattgagcagtttggaagtacttttttggtagaatctgtgaagggatatttgggagtgctttgaggcctatactaaaaaaagaaacattatcagagaaaagttagaaagaagctttctgagaaacttctttgtgatgtatgcattcttctcacagagttaaaactttcttttccttgagaagtctggaaccactgtttttttagaatcaaggaagggatatatgagagctctttgtggcctatagtgaaaaaggaaatattttcagataaaaactagaaagaagttttctgagaagctgctttgtggtgaatgcattcatctcacagaattaagcctttcttttgattgagcagtttggcaacactctttttgtagaatctgagaagggatattagggagtgctatgaggcttatagtgaaaaaaacaacatcttcagataaaaactagaaagaacttttctggacaactgctttatgatgtgtgtattcaaatcatagtgttaaaactttcttttgattgagcagtttgccaatactctttatgtagaatctgagaaagaatattttggggtgatttcaggcctatagtgaaaaagagaacatcttcagataaaaattagaaagaagctttctgagcaactactttctgatatgaccattcatctcagagaggtaaacctttctttgattgagcagtttggtaacacagtttttgtagattctgtgaagggatatttgggagcactttgaggcctgtggtgaaaaggaaatatcttcatatgaaaactagaaagaagctttctctgaaactgccttctgatgtgtccattcatctcatagagttaaaacattcttttaattgagcagttgggacacactgttctggtaggatctgcgaaggaatatttgggagcacatacaggcttataatgaaaagttatatgtctgcaaataaatactagaaagaagctttgtgagataatgctttgtaatgagtaagttcttctcacacagttaaatctttcttttgatagtgcagtatggcaacatggcttttgtaaaatctcagaaaggatattttggagtgctttgaggcttgtgttgaaaaacaaaattatcttcaggtacaaactaggaagaagctttctggtaatctgctttgtgatgtgtgcattcttctcaaagagttaaacttatcctttagttgagcactttggaaatactgttgttggaaaatttgccaagggatatatgggagctcattgaggcctatgttgaaaatggaagtatcttcagacaaaaaccagaaggaagctttctaagaaactgttttgtgatgtatgcattcagcttacagagttaaaccattcttttcattgagcagtttgaaaacactgttttcgtagaatctgcaatgggatatttgagagttccttgaggcttatgttaaaaaaaggaaagattatcaaaaaaaaaaaagtagaaagaagctttctgagaaactccttcatgatgtgtgcatacttctcacagagttaaacctttcatttcattgaacagtctggaacctctgtttctttagcatctaggatgggatatatacaagtacttcgaggtcaatggtgaaaaaggaaatatcttcaaataaaaactagaaagaagctttctgacaaactactttgtgctgattacattcatctctcagtgttaaacctttcttttgattgtgcagtttggcaacagctctgttgtaaaatcagagaagggatatttgggagtgctttgaggccaatgttgaaaaacaaaatatcttcagatataaactagaaagaagctttctgggaatatgctttgtgattgtgcattcttctcacagagttaaaccgttcttttaattgagcagtttggaaatgctgttgttggagaatctgcctagggatgtatgggagctcattgaggctcctggtgaaaaaggaaataacttcagataaaaactagaaagaagttttctaagaaacagccttgtgatgtgtgcattcaccttacagagttaaaccattcttttcattgagcagtttagaaacaatgttttagtggaatctgcaaagggatattttggagcgccttgaggtgtatggtaaaaaaggaaacaacatctgagaaaaagcagaaagaaactttctgagaaactcccttgtgatgtgtgcatgtttctcacagagttaaacatttcatttcattgagcagtctggaaactctgctttttcagagactagcaagggatatatggtagcacattgaggtcaatggtgaaaaaggaaatatcttcagataaaaactagaaagaagcattctgagggactgctttgttctgagtgcattcatctcatagagtgaaacctttctttgattgatcagtttggccaccctctttttgtacatcttgagaagggatatttgggagcactttgagacctttagtgaaaaagggaatgtctccagataaacactagaaagaaactttctgggaaactgctttgtgatgtatgcattcttttcacagaggtaaacctttcttttgattgagcaatttgcaaaccctgttttggttgtatctgtgaagtgatatttgggagtacattcaggcctatggtgaaaaaggaattaccttcagagaaaaacaagaaaaaagctttctgagatactgctttgtgatgtgtgcattcatctcagaggtaaacgtttcttttgattgagcagtttggaaacatagtttttgtagaatctgtgaaggggtacttgggagtgccttgaggcctatggtgaaaaaggaaacatcatgagagaaaaagtagaaaggagcattctcagaaacttctttgagatgtgtgcatccttctcacagagttaaagttttcttttcattgagcagtctgaaaacactttttttttagaatctaggaagggatatatgagagctcaatgaggcctgtagtcaaacaggaaatatcttcagaaataaaactagaaagaagctttctgagtaactgctttgtgatgagtgcattcatctcacagagttaaaatttcctttgattgagtaatttggcaacattctttttgtagaatgtgagaagggatatttgggagtgctttgtggcctatagtgaaaaagggaacgtcttcagataaatagtagaaagaagctttctgggcaactgctttatgacgtgagcattcctctcacagtgttaaacgtttcttttgattgagcagttaacccatactctgtgtgtagaatctgagaagggttatttgggagttatttgaggcctatagtgaaaaagggaacatcttcagataaaaagtagaaaggagctttctggacaactgctttctgatgtgtgcattcatcccacagagttaaacctttcttttgatttagcagtttgcacactcggttttttttagattatgtgaagggatatttgggagtgctgtgaggtctatggtgagaaaggaaatatcttcagatgaaaactagaaagaagccttctcatacacagccttctgatatgtaccttcatctcacagagttaaagcattcttttgattaagctatttggaaaaactgttttgttaggatctgtgaagggatatttgggagcacttacaggcctattgtgaaaaagttaaatatcttcagataaaaactagtaagaagctttgtgagaaactgatttgtaatgagcaagttcatctcacagaattaaacgtttcttgtgattttgcaatttgtccagagtgattttgtaaaatctgagaagggatatttgggagcgctttgctgtctatgtggaaaaacaaaatatcttcagatataaattagaaagaagcttcccagaatctgctgtgtgatgtgggcattcttctcacagagtttaactgttctttcaattgagcagtttggaaacattgttgttgggaaatctgccaatggatatatgggagctcattgaggcctatgatgaaaaaggaaatatcttcagataaaaactagaaagaagcttcataagaaactgctttgtgatgtgtgcattcacctcacagagttaagccattattttcatggagcagtttggaaacatcgttttggtagaatctgtgaagggatatttgggaatgccttgaggcctatggtaaaaaagcaaacatcatcagagaaaaggtcgaaagagtctttctgagaaactcctttgtgaagtgtgcatatttctcacagacttaaacctttcatttcattgagcagcctggaacctctgtttttgcagaatcaaggaaggtatatatgagagcacattgaggccaatggtgaaaaggaaatatcttcagataaaaactacaaagaaggtttctgagaaagtgctttgtgctcagtgcattcatctcacagagttaaacctttcttttgatttagcagtttggaaacactctttttgtagattctgtgaagggatatttgggagcactttgaggcctatggtgaaaaaggaaatatcttcagatgaaaactagaaagaagcattcctgtaaaccaccttctgatgtgtgcattcatctcacagagttaaagtattcttttgattgagctattttgaaacactgttttggtaggatctgagaaatgttatttgggagtgcttacaggcctattgtgaaaagttaaatatcttcacataaaaactagaaagaagctttgtgagaaactactttgtgatgagcaagttcatctcacagagctaaacctttcttgtgattgtgcactttggcaaccttgctttagtaaaatctgagaaggaatatttgggagtgctttgaggtctatgttgaaaaacaaaataccttcagttataaactagaatgaagctttttcgaaatctgctttgtgatgtatgcattcttatcacagaggtaaaccattattttaattgagcagtttggaaacactgttgttgtagaatctgccaacggatgtatgggagctcattgaggcctaaggtaaaaaaggaaatatggttagataaaaactagaaagaagctttctaagaaaccactttgggatgtgtgcattcacctcacagaactaaaccattaatttcattgagcactttggaaacactgtttttgtagaatctgtcaacagatatttgggagtgcactgatgcctatggtgaaaaagggaatatcttcagattaatactagaaacaagctttctcagaaactgcttcatgaagtgtgccttcttctcacagagttaaactgttcttttgattgagcagtttggaagcactgtttttgtagaatctgtgaaggggtatacaggaacacattgaggcctatggtgaaaaaggaaatgtcttcagagaaaaactagaaagaaggtttctgagaaccagctttgtgatttgtgcattcatctcacagagttcaacgtttcatttcattcagcagtctggaagcatacttttggtagaatctgctaaggtacataaggagtgctttgaggcctatggtgaaaaaggaaatatcgtcaaagaaaaagtagagagaggctttctgagaaactcctttgtgatgtgcccattcatctcacagaggtaaacttttattttgattgatcagtctggatacactgtttttgtagaatctaggaaaggatttatgggagtacattggggcctatggtgaaaaagacaatatcttcagataaaaactagaaagaagctttctccaaaactgctttgtgacgtgggcattcttctcactgagttaagcatttcctttgattgaacagtctggaaacactgtttttctaaaatctatgaagtgatatgtgggagcaatttgaggcctattgtgaaaaaagaaatatcctcagagaaaaactagaaagaagacttctgagaaactgctttgtgatgggtgcattaatctcaaggagttaaacctttcttttgattgagcagtctggcaaaagtatttttgtagaatccgagaagggatatttaggagtgctttgagacctatggtgaaaaaggaagtatcttcagataaaaaccagaaagaagctttctgtgtaactgctttgtgatgtgtgcattcatctcacagagttaagcctttcttttgattgagcagtttggcaacatagtttttgttgaatcatgaagggacatttgggagcacattgaggtctttggtgaaaaccgaaataccttcatataaacaggagaaagaagctttctcagatgccggtttgtgatgtgtgcaatcttctcactgagttaaacctttcctttgattgagcagtttggaaacactgtttctgtagaatctgtgaagggacacttgggagcacatagaggcctatggtgaataacaaaataaccccagataaaaactagaaataaggtatctgtagaactgcattgtgatgtgtggattcacctcacacagttaaacatttcttttgatttggcatgttaaaaacactcttttctaagatctgtgaagggaagtcttggagcccattgaagtaaacgatgtggagtaaacgaatattccctgataaaaactgaaaagaagctatccgtgaaactactttgagatgtatggattcttctcacagttttaaaatttcttttgatgcagttggttggaaacacttttttggtagaatctgcaaagggacatttgcaaatccatggaggacaatggtgaaaaacagaatatcccaacataaaaactagaaactgttaatgaaactgcttggtgatgagtggattcacctcacagaggttaacctttcttttgattcagcaggttggaaacactctttctgtagaacctgcaaagggacatttgggagtccactgaggtctactttgaaaaactgaatatcgccagataaaactagaaataggttatctgtgaaactgtttgtgatgtgtggaatcatctcccaaagttaaacatttcttttgattcagcagcttggaaacactctatttgtagaagctgcgaagggacatttgagagcccgctgaggcctatggtaaataattgaatatcctgaggtaaaaactagaaagatgctatctgtgaaactgctttgtgatacgcagactcatctcaaaaagttaaacctttcttctgattcatcaggttacaaacactttttttgtaaattcagtgaagggatatttagaaatcctttgaggtctgcagtaataaaccaagtaattccagaaaaaaacaagagagaagctgtctgtaaaactgcgtttgtgatgtgtgtattcatctcacagagttactcctttctttttatactgtagcattgaaatagtctttagatagaatctgcgaatggacattttggagcccttagaggcctatgatgaaaacccaaatatatccagataaaaacttcaaagaagctatctgtgaaacttcgttgtgatgtgaggattcatttcacagagctaatcctttctttttattcagtaggttgtaaacattattttggtagaatctgtgaagggacacttgggagcccatgctgagaaatggaatatcctcagataaaaaccagaaaaaaatctacttgaaaatgctttatggttttaggtctaacatttaagtctaatccatcttgaattaatttttgtataaggtgtaaggaaggaatccagtttcagctttctacacatggctagccagtttcacagcaccatttattaaatagggaatcctttccccatttcttgtttttgtcaggtttgtcaaagatcagatagttgtagctatgtggcattatttctgagggctctgttctgttccattggtgtatatcactgttttggtaccagcaagatgctgttttggttactggagccttgtagtatagtttgaagtcaggtagcatgatgcctccagctttgttcattagacttaggattgacttggctatgcggacttttttttttgttccatatgaactttaaagtagtttttcccaattgtgtgaagaaagtcgttggtagcttgatggggatggcattgaatctatcaattaccttgggcagtatggccattttcatgatattgattcttcctacctatgagcatggaatgttcttccatttctttgtatcctcttttatttcattgagcagtggtttgtagttctccttgaagagatccttcacatctcttgtaagttggattcctaggtattttattctctttacagcaattgtgaatgggatttcactcatgatttggctctctgtttgtttgttattggtgtataagaatgcttgtgatttttgcacattgattttgtatcctgagactttgctgaagttgcttatcagcttaaggagattttgggctgagatgatggagtgttcttgatatgctatcatgtcatctgcaaacaaggacaattttatttcctcttttcctaattgaataccctttatttctttctcctgactgactgccctggccagaacttccaacactatgttggataggagtggtgagagagggcatccctgtcttatgtcagttttcaaagggaatgcttccagtttttgcccattcagtatgatattggctgtgggtttgtcaaagatagctcttattattttgagatacgtcccatcaatacctaatttattgagagttttagcatgaagtgttgttgaattttgtccaaggccttttctgcatctattgagataatcatgtggtttttgtctttggttctgtttacatgctagattacatttattgattcacgtatgttgaaccagccgtgcatcccagggatgaagcccacttgatcatggtggataagtttttgatgtgttgctggattcggtttgccagtatttcattgaagatttttgcattgatattttttgcattgaccaatcttgcattgatgggatattggtctaaaattctcttttttgtcatgtttctgccaggctttggtatcaggatgatgctgacttcataaaatgagatggaaaggattccttcttttttactgattggaatagtttcagaaggaatggtaccagctcctctttgtacctctggtagaattcggctgtgaatccatctggtcctggaccttttttctttggtaaactattaattattgcctcaatttcagagcccgttattggtgtattcagagattcaacttcttcctggtttagtcttgggagggtgtatatgtcaagggatttatccatttcttctagattttgtagtttttttgtgtagaggtgtttatagtattctttgatggtagtttgtattactgtgggattggtggtcatatcccctttatcactttttattgcatctatttgattcttctctcttttcttctttattagtcttgctagtgttctatcaattttgttgatcttttcaaaaaccagctcctggattcattgattttttgaaggtttatttgtgtctctatttccttcagttctactctgatcttagttatttcctgccttctgctagcttttgaatatgtttgctcttgcttctatagttcttttaattctgatgtcagggtgtcaattttagatctttcctgctttctcttgtgggcatttattgctataaatttccctctactgactgctttgaatgtgtcccagagaatctggtatgttgtgtctttgttctcattggtttctaagaacatttttatgtctgccttcatttcgttatgtacccagtagtcattcaggagcaggttgttcagtttccatgtagttgagtggttttgagtgagtttcttaaccctgagttccagtttgattgcactgtgatctgagagacagtttgttataatttctgttcttttacatttgcttattagtgctttacttccaactacatggtcaattttggaataggtgtggtgtgttgctgaaaagaatgtatattctgttgatttggggttggagagttctgtagatgtctattaggtcctcttggtgcagagctgagttaagttcctggatatccttgttaactttctgtctcattgatctgtctaatgttgacagtggggtgttaaagtctcccattattattgtgttggattctaagtctctttgtaggtctctaagtactagctttatgaatctggatgctcctgtattgggtgcatgtatatttaggatagttagctcttcttgttgaattgatctctttaccattacgtgatgtccctctttgtctcttttgatctttgttggtttaaagtctgttttatcagagactaggattgcaacccctgcctttttttgttttccatttgcttggtagatcttcctccaaccctttattttgagactatgcgtgtctctgcataaaaaccgaagaagaaaacctaggcattaccattcaggatgtagccatgagtaaggacttcatgtctaaaacaccaaaagcagtgtcaacaaaagccaaaattgacaaatgggatctaattaaaaataaagagcttctgcacagccaaagaaactaccatgagagtgaacaggcaacctacagaatgggagaaaatttttgcaatctactcatctgacaaagtactaatatccagaatctacaatgaactgaaacaaatttactagaaaaatcaaacaaccccgccaaaaagtgggcgaaaggtataaacagacccttctcaaaagaagatgttaaagcagccaagagacacatgaaaaaatgctcatcatccctggccatcagagaaatacaaatctaaaccactatgacgtaccacctcacaccagtcagaatggcaatcattaaaatgtcaggacacaacaggtgctggagaggatgtggagaaataggaaaacttttacactgtttttgggactgtaaactagttcaaccattgtggaagtcagtgtggcaattcctcagggatctagaactagaaataccatttgacccagccatcccattactgggtatatatccaaaggattaaaaatcacacagctataatgaaacatacacaggtatgtttattgtgcattattcacgataggaaagacttggaaccaacccaaaagtctaacaatggtagactggattaagaaaatgtgtcacatatacaccatggaatagtatacagccataaaaatggtgagtttatgtcctttgtagggacatagatgaagctggaaaccatcattctcagcaaactatcacaaggacaaaaaaccaagcactgcatgttctcactcataagtgagaattgaacaatgagaacacatggacaaaggaaggggaacatcacacaccagggtttgttgtggggttgggggagggtggtgggatagcattagtagatttacctaatgttaaataacaagtaaattagtgcagcacaccaacatggcacatgtatacatatgtagctggcaccttgtgcacatgtaccctgaaacttaaagcataataaaagaaaagcaatttgagtaactaaaattctgaaaaattaaaaaaaatattctgtgatgtgtggattcatctcacagagaaaaacctttcttttgattctgcaggttggaaaagttctttggatagaattatagagggaaaattgggagcacatagaggcctgtggtgaaaaactgaatatccccagataaaaactagaaagaagctatatgtgaaggttctttttgatgtgtggaatcatctcttaaagttaaacctgcctttttgattcaggagtttgcaaatacttcttttgcagaatctgcgaagggacatttgagagccctttgaggctcatggtgagaaaccgaatatcaacagataaaaactagaaggaagctatctgtaaaactgcttcataatgtgtggattcatctcacagagttaaacatacattttcattctggaagttggaaggtgctttaggtgcaatctgcaaagggacatttgggagcccattgatgctgatgatttaaaacaaaatattccaagataaaaactagaaaaaactatctttgaaacggcattgggatgcgtggattcatctcacagagttaaatttctcttttgattcagcaggctggatagacttttttcgtataatctgtgtagggacatttgggagccatttcacacctgtcatgaaaaaccaaatatccccagataaaactagacagaaactatctatgaaactggattgcgatgtgtggattcacatcattgatataaacctttattttgattctacagattgcaaaactctttcagaagaatctgcaaagggacatttggaagcccatagaagccaattgtgaaaaagcaaatagtcccagatgaaaactagaagaagctatatttgaaactgcattgtgatgtggcgattcatctcacagagttaaacctttctttgggttcagcaggtttgaaacactcttttggtagaatctgtaaagggatacttgggagactatagaggcctattttgaaaagccaggtatctccagataaaaactagaaggaagctacctgtgaaactgttttgtgatgtgtgtattcatcttatctcacagagttaaaactttcttttgattcagtaggtggtaaacactcttttggtagaatctgcaaagtgacatatcacaacccattgatgcctatggtgaaaaaacggatatccccatataaaaactagaaagaaggtatttctgaaactgcattgtgatttgtgcatttatctcacggagttaaatatttctattgattcagcataatggaagcaatctttttgtagaatctgcaaagggacatttgggagcccttttactgctatggtgaaaaatcgaatatccccagacaaaaacaagaagcaagctatctgtgaaactgctttgtgatgagtggattcatctcacaggttttaaccttttgttttactcagtgagttgaaaacactctttttttttagaatctaccaagggacacatgggaacccacaaaggcctatggtggaaaagtgaatatccccagataaaaactaggaacaagctgtctgtgaaactacattgtgatgtgtggtttacttcccacagttaaacatttcttttgattcagcaggttgcaaacactgttttaatagaatctgtgaaggtacatttgggagactattcaggcctatggtgaaaaaccaaatacattcagaaaaaaacctgaaagaagctatctgtgacactgctttttgatgtgtggattcatctcacagagttaaacacttctttagatacagcagtgttgaaatattctttaaatagaatctgccaagagacgtttttaagcccatataggcctaagttgaaaaacagaatatcaccagataaaaactagaaacaagctattggggacatttctttgtgacatgtggattcccccacagagttaaaacttttttgacttagcactttataaacactcttttcttgaaactgtgaagggaaatttgtgagcccattttagcctatggtgaaaaatggaatatcccaagataaaaaccagaaagacgctatcagtgaaactgttttggatgtttcgattcacctcacagacttaaaccttcttttgattaagcaggttggaaacactcttttggtaaaatctgcagagggacatttgggagccctttaaggtcaatagtgaaaaattgaatatcaccagattataactagaaagaagccatctgtaaaactgctttgttatgtgtggattcatctcactgactgaaaactttctgtcaattcagcaggtttgaaataatctttttgtagaagccatgaaaggacatttgggagccctttgtgaataaccaaatatccccagataaaaaaataggaggaaattatctgtgaaattgctttcagatgtgtgggttcatctcagagttacatttttcttttccttcaacaggtgtgaaactatttttggtagaacctgtgaagggatatttgggatcccataggaaaaacaatatctgcagataaaaactagaatcaagccctctgtgaaactattttgtgatatgtagattcgtttcacagatttaaacctattttttgattcagcaggtgggaaacactctttgggtaggatctgtgaagggatattttggagacctttgaggcctatggtgaaaaaccaaaattccctagatacaaactagaaagaagatctcatgaaagagcattgtgatgtgtggattcatctcacagagttaaaatttttttttgattcagtagttttgaaacactgttttggtagattctgtgaagggacattttgaagccctttgaggcatatggtaaaaaccatgatttccccagatatatcaagaagaagctaactgtgaaagtgctctgtgatgtgtggattcaccttagacttaaacctttcttttgattcggcatgttggaaacattcttttggtagaaactgcaaagacatatttgggagcccattgaggcctgtaatgaaaaacaacatacccaaagataaaaactacaaagaagatatctgtgaaactgctctgtgatgtatggatttatctcacagaattaaacctttcttttgattcagctgttggaaacactcttttgctagaatctgagaaaggacatttgccagcacactgaaccctatgttaaaaaaccgaatatcccaagataaaaattagatagaagctatcaataaaatgtatttttgatgtgtagattcattccacagaggtaaacttttctttttcatttagcaggttgcaaacactccttttgtataatatactaagggatatttggaggcccattgaggtctatggagaaaacagaatatcaccagacatctgtgaactgctttgtgaggtctggattcatctcaaagaggtaaaacgttcctgaaagcagcgtgtgggaaacactcttttggtagaaactgcaaagtcctttgaggtctatggtgaaaaactgaacgtccacaaataaatattagaaaggagctgtcagtgaaattgctttgtgatgtgtggattcgtcccactgatttaaatctttcttttgatacagcaggattgaaacagtctttagttagaatctgtgaagggacatttgaaagcccatagaagccaatgttgaaaaactgaacatccaaagataaaaactagaaataagctatctgtgagcttgctttgttatgtgtggaatcatctcagagatttaaacctctcttttgattcagcaggttgcaaacattcctttgctagtatctgagaaaggacaattgaaagcccattgtagcactttgtgaaaaattgaatattcaaagataaaagctagaaagaagcttttagtgaaactacttagtgatgagtggattctactcagagagtgaaacttttctattgttcagcagtttggaaactctcttttcgtaaaactgggaaacggacatgtgggagcccattgagacctatggtgaaaaatcatatatttccagagaaaaacaagaaaaaagctatctgtgaaactgctctgtgttgtgtggattcatctcacagagttaaaactttattttgattaaggaggttggaaaaacttgtttggcagaatctgcgaaggaagctttggaagctttttgaggcctatggtgaaaaacagaatatccacagataaaaactacaaagtagctatctgtaaaactgctttgtgacttgtagcttcatctcacagaggtaagcctttcatttgatttagcacgttgaaaaccctcgttttgtagaacctgagaagggatactttgaagcccattgactcctatggtgaaaaaagaaatatccctagttcaaaactagaaggaagctacctgtgaaactgatttgtgttgcatggattcaccacttatagttaaacttttcttttgatccagcaaatctgaaacactctttagggagaataagtgtagggtcatttgggagaatgtagaggcctatggtgaaaaagagtatatcgccagataaaaactaaaaagaaagtgtctgtgaactgctgtgtgatgtgtggattcacatcacagaattaaacttttgttttgattcagcaggtgtgaaaccctcttttggtgggatctgcaaagggacatttggaagcccaaagatgtttatggtgaagaaccgaatatatctagataaaaactagaaagaaactactcgtgaaactgccttgtgatgtgtggattcgtttcacagagttaaatatgtcttttggttcagtaaattttaaacactcttggggtagaaccttttaagggacatttcagagtccttagaggcctatggtaaaaaaacaaatatccccaggtaaaaactagaaagaagctatctgttaaactgctttgtgatgtctgtattcaaatcacaaagttaagcctttctttggattcagcatgtcacaaacactctttttatagaatctgtgaaggtacatttgggaacactttcaggaatatagtgaaaaacagaatacccccagatactaaccagaaagaagctctttctgaaactgcttttttgatgtgtggattcatctcacagggttaaaccttccttagattcagcaggttggaaacgctcgttttttagaatctgcgtggggcattttgaagccatttgaggcctatgattaaaaaaaaaagacactatatccccagataaaaactaggaatcagctatcggtgaacttctttgtgacatgcagagtcatctaacagaggtaaacgtttcttttgaaacagcgtgctggaaacattgtttttgcagaaactgcaaagacaaatttggaagcttttagaggcctatggtgaaaaacagaatgttcatagataaaaactataaagaagctatctgcaaaacaaccctgcgatctgtggattcatctcacagagataaacccgtctattgaatcagcaagttgcaaacactctttttgtataatctgcaaagaaacttttggagtccatggaggcctatagtgaaaaacggagtatccccagataaacactagaaaaaagctatctttgaaactgctttgtaatgtgtggattcatctcacagaattaaaccttttcttttattatccaggtttgaaactctcttttggtagaatttgtgaaggaaggtttgggaagccatagaggcctatggtgaaaaacagaatatccccagataaaaactagaaaaagctgcctgtgaaactgcttcatgatatgtggattcatctcaaagggttaaacttgtttttgattcactagattagaaacactctttttctggaatctccgaaggcacattttgcaggccactgtagtctatggtaacaaacagaatatcccaagctcaaaactagaaagaggctatctgtgaaacttctttgtgatgtgtggattcatcccagagaagtgaacctttcttttaattcagcaggttgcaagcacacttttgcagagtctgaagagacttttgaaagctgtttgagtcctttggtgagaaacaaaatgtccacagataatcacagggataaaactatctgttaaactactttttgatatgtggtttcatctcacagtgttgaacctttcgttttactcagcaggttggaaacactctttggttagaagttatgaggaaacatttgggagctttttgaggcctattctgagaaactaaacatccccagataaaaactagaaaaaagctatctttgaaactgctttgtgatgtgtgtattcatcttacagagctaaatttttattttgacacagcaggtttgaaactctctttaggtagaatctgcaaaggtatatttgggagtgccttgaggcttacagtgaaaaataaaatatccccagataaaaactagaaagaaactatctgtgaaacttctttgtaatgtgtggattcacctcacagagttaaacctgtcttttcattcagcaggttggaaaccctctttttggagatcctgccaaaggacgtttgtgagccctcagaggcctgtggtgaaaaacagaatatccaatgataaaaactagagaaaacgtatcaatgaaactgccttgtgatatgtggattcatctcacagagctaaacatttcttttgattcagtatcttggaaacacttgttgtgtagaattggtggaaagacatttgggagccaatagaggcctaaggtgaaaaactgaatatccccagataaaaactagaaagaaactatctgtgtaactgctttcataagtgtggattcctctcacagagttaaacctttcttttagattcagcaggttgcaaatacttatgttttgtaatctgtgtagtgacatttgggagcccattaaagcctatgatgaaaaatcaaatatccccagataaaaaccaaaaagaagctatctttgaaactgtttagtgatgtgtgggttcatctcaaagtcttaaatctttcttttgactcagcgtgttggaaacactcttttgctagaatctgcaaaagatttttgagcccactgtagtctagggtaaaaaaaccccacaaatattgcagaataaaaactagaaagaagctatcagtgaatctgctttgtgatgcatggattcatttcacagaattaaacctttattttgatacttcaggttggaaacacttttttgtagaatctgtgaagggacatttgagagagatttgaggcctataatgaaaaactgaaaatccccagataaaacctagaaggaatctctttgtgaaactgtttgggatgtgtttattcagctaatagagttaaaattttctgccaatataacatgtttgaaacaatatttagatagtatctgtgaagggacatttaagagcccataaaggcctatggtgaaaaaaagaatatcgccagatataaagtagaagaaagctaaagatgtaactcctttgagatgtatggattcatgtcacatagttaaaactttcttttgtcacagcaggtatgaaaccctctttagttatcatctgtgaagggactttcaagagcccatagaggcctatggcaaaaaactcaaaaactccagataaaaactagaaggaagctctgtttaacttgtttgtaatgtctggatttatctcacagagatacaattttatattgattcagaaagttggaatcactcttttggtagaatctgccaagggacatttgggatcccttaaaggcctatggtgaaaaactgaatacaccttgataaaaactaggaagaagctatctgtgaaattgcattgtaaagtgtggattcatgtcacagagttaaacatttgttttgattcatcaggttggaatcactgattttgcagattctgtgaagagacattgtagagcctattgagtcctatggtgagcaacccaatatttccagataaaaaccagaaggaagctatttgtgaaactgttttgtgaggtgcgattcatctcacagatgtaaacactttttttgattcagtaggttggagatactcattttgtagaattggcaatgggatatttcagggcccattgaggcctaagcttgcaaacccaatatcccgagataaaaactaaaaaggagctgtcagtgaaactgctttgtgatgttgggatttattttacagaattaaacacttcttttgacttagcaggttgtaaacactcttttcgtagaatctgcatagagacatatcacagcccattgaggcctatggtgaaaaaacagatatccccagataaaaactagaaagaggcatttctgaaactgcattgtgatgtctgcatttatctcacagaggcaaatctttgtattgattcagcaggatggaaaaactctttttgaataatctgcaaagggatatttgggagatcttttaggcctgtggtgaaaaataaatatccccagataaatactgcaaagaactgaagagtgacacagcttttctgatgtgtggatttatctcacagacttaaacctttcctttcattctgcaggtttgaaacactcattttgcagaatctgtgaagggacattatagagccccttgaggtctattgtgaaaaataaaatatcctcagataaaaactagaaagaagctgtctgtgaagtgctctgtgatgtgtggattcattgcacagagttgaaactttcttttgatgcgccaggatggaaacactctttagatattatctgcaaaggaacatgtattagcccatacaggcctagggtgaaaaaacgaatatccccacataaaaactatcaagaagctatctgtgaaactgctttgttaagtgtagattcagctcaaagggttaaacctttctttggattcagcaggttgcaaacactcttttgctagaacctgccaagggacatttgtgagcccattgttgctcactgtgagaaatggaatattcaaagacaaaaactagaaagaagctttctgagaaactgctttgtgatgtgtgcattcttctcacagacttaaacctttcatttgattgagcaattttggaaacactgtttttgctgaatctacacagggatatatgggattgcattgaggcctatggtgaaaagagaaatatcttcagataaaaaatagaaagaagctttctgggaaactgctttgtgatgtgtgcattcaccacccagagttaaacttttttttgattgagcagtttggatacactgtttttgtaaaatctgtgaagggacatctgggagtgcttggaggcctatggtgaaaaagtaaatgtctttagacaaaaagtagaaagactctttctcaaaaaccgcttagtgatgtgtggactcttctaacagtgttaaactgttcttttgtttgaacagtttggatacactgttttggtagaatctgtgaagggatatttgggagtgcattgtggccttttgtgaaaaagaaatatcttcagggaaaaactagaaagaagctttcagagaaactgttttgtgatgagtgcattcagctcacaaacttaaaactttcttttgattgagcactttgcaaacactgcttttgtagaatgttcgaagggatatttgggagccattagaggcctatattgaaaaaggaaatatgtttgagaaaaactggaaagaagtttctgcataactgctttgagaagtgtgcattcatctcacagagttaaacttatagtttgagaagattggaaacactgttttggtagaatctgtgaacagattttttggagtgctttcagacctatgatagaaaaggaattatcttcagataaaaactagaaggaaacattctgagagatggctttgtgatgagcacgtttatctcacagagttaaacctttattttgattgagcagtttggcaactgtgttttgtaggcactgagaagggctaattaggagtggttttaggcctatggtgaaaaccgaaatattgtcagttagaaacaagtgagaagatttctgggcaacttctttgtgatgtgtgcattcatctcacagagttaatcctttcttttgattgagcagtgtggaaacactgtttcagtagaatctatgaagagatatttgagtgcactgagtgctatggttcaaaaagaaatatattcagctaaaacttaaaaggtttctcagaaactgctttgtgatgtgtgcatttttctcacaaagttaaacatttcttttgattgagttgtctggaaacattgtttttgtagaatatacaaaaggatatatgtgagagctttgaggcctatggtgaaaaaggaaatattttcagttaaaaactagaaagaagctttctgagaaactgctttatgatgattgcattcatctcacagataaacctttcttttgattgaccagtttggaaacactgtttttgtagattctgtgaagggacattctggagcacattgaggcctatggtgaaaaaggaaaaatcttcagataaaaactagaaagaagctttcttaggaaccactttttgttgtgttcattcttctcacagagttaaaactttcttttgattgaatagtatggaaacactgttttcgtagaatctacaaagggatatatgggagcccattgacacctatgatcaaaaaggaaatatcttcagataaaaactggaaagaagctttctgagaaactactatgtgatgacagcattcgtctcatagagttaaacctttcttttcattgagcagtttagaaacacagtttttgtagaatgtgagaagggatatgtgggagggtttgaggcctatggtgaaaaacaaaatgtcttcagataaatactagaaagaagctttctgggtgactgccttgtgatgtgtacactcatgtcacagagttaaacattattttttgattgatcagtttggaaacactcttttggtagaatcaatgaagagatatttgggagcgtattgagctctatggtgataaaggaaatatctttagataaaaactagaaagaagctttctcagaaagtgttttgtgatgtgtgcattcttctcacagagttaaacctttcttttcattgagcagtctggaaacactgtttttgtaggatctatgaagagatatatgggagcacattgaagcctatggtgaaaaaggaaatgtcttcagataaaaaatagaaagaagctttctgagaaactgctttgtgatatgtgcattcatgtcacagagttagacctttcttttgattgtgcagtttcacaacattgttgttgtggaatctaagaggggatatttgggagtgctacaagaccttgaatgaaaaaggaaatatcttcagataaaaattagaaagaagctttctgggaaactgttttgtgatgtgtgcattcatttctcagaggtaaaacttttttttgatagagaagtttggaaaacgtatgtttgtataatctgcgaagggacttttgggattgatttgaggcctatgctgaaaaaaggaaatatcttcagataaaaagtagaaagaagctttctgagaaactgctttgtgatgtgtgcatttatcccacagaattaaaacttccctttgattgggcagtttggaaacacagtttttgaggtacctgtgaagggttatttgggagcacatcaagatctatggtgaaaaaggaaatatcttcagataaaaagtagaaagaagctttctcagaaccgctttgtgttgtctgcattcttctcacagagtcaatcctttcttttgatagagcagtttttaaaacctgattttatagaatctgtgaaggcatatatgggagcccataaggccaattgttaaaaagataatatcttgagggaaaaactagaaagaagctctctgagaaactgccttgtgatgtgtgcattcttctcacagagttaaacctttcttttgattgagcagtctggaaacactgttttcgtaggacctatgaagagatatatgggagcgcattgaagcttatggtgaaaaaggaaatatcttcagataaaactagaaagaagctttctaggaaactgcgttgtgatgtgtgcattcatctcacagagttaaacctttcttttgattgtgcagttttgcagcattgttgttgtggaatctaagaagggatacttgggagtgcaataagaccttgaatgaaaaaggaaatatcttcatataaaaattcgaaagaagctttctgggaaactgttttgtgatgtgttcattcatttctcagagttaaacctttttttttgatagagaagtttggaaaccgtgtgtttgtataatctgcgaagggatgtttgggatcgatttgaggcctatggtgaaaaaaggaaatatcttcagataaaaactagaaagaagctttctgagaaactgctttgtgatatgtccattcatctcacagaattaaaacttccttttgattgggcagtttagaaacacagtttttgaggtatctttgaagggataattgggagcgtattgagatctatggttaaaaaagaaatatcttcagataaaaagtagaaagaagctttctcagaaactgctttgtgatgtctgcattcttctcacagaattaaacctttttttttgattgagcagtttggaaacactgtttttgtagaatctacacagggatatattgaagagcatggaggcctatggtgaaaaaagaaatctcttcagataaaaagtagaaagaatttttttcagaaactgctttgtgatgtggacattcctctttcagagttaaaccattcttttgattgagcagtttggaaccactgtttttgtagaatctatgaagggatatatggaagggcattggcacttgtggtgaaaaaggaaatatcttcatagaaaaactggaaagaaactttctgagaaactgctttgtgatgtgtgcattcatctcacaaagttaaaccattcttttgattgagcagtttagaaacactgtttttgtggaattttcaaagggatatttgagagtgctttgaggtctatgctgaagaaggaaatgtcttcagataaatactagaaagaagctttctcaaaaaccgctttgtgcctttgtgcgttcttctgacagagttaaatctttcatttgattgaggaaattggaaacactgtttttgtagaatctgagaggggatatttggaggcactttgagaactatagtgaaaacagaaatatcttcagataaaaagaagaaagaagtttctcagaagctgcattgtgatgtgtgcattcttctcacagaattaaacctttcttttgatagaacagtttggaaatactgtgtttgtagaatctacacagagatatatgagagcacattgagtcgtaaggtgaaaaaggaaatatcttcagattaaaaatagaaagaaggtttctaatatgtgcatttctctcacagagataaacttttttgattgtgtggtttgtaaacactttttgtaaaatcaataagggatatttcagagcactttgaggcctaaggaagaacaagaaatgtgttgagataaaaactagaaagaagatttctgagaaactgctttgtgatgaatgccttcatctcacagaattaaaactttcttttgattgaacagtgtggcaacacgctttttgtggattccgaaggggatattttggagtgctttaaggcctaagtgaaaaggaaataccttcagataaaaattagaaagaagctttgtaggaaacggctttgtgatttgtgcattaatctcaaaaatttaaaacagtattttgattgagcactttggaaacactgttttggtggaatctgtaaagggatatttctggaaagatgcattctggtaaactgctttcagatgtgtgcattgatctcacagagataaaattttctttggattgagcagtttggaaacactgttttggtaggatctgtgaagggatatttgggaacacattgaggcctacaatgaaaaaggaaatatcttcagataaaatctagaaagaagcttttgagaaagtgctttgtgatgagtgaattcatctcccagagttaaactttccttttcattgagcattttggcaatactctttttgtggaatctcagaagggatatttgggagctctttaaggcttagggttgaaaaaggaaataaaatcagataaaaactacaaagaagctttctgagaaactgctttgtgatgtgggtattcatcttacagaattaaaccgttcttttgattgagcagtttggaaccattgtttttgtagaaactatgaagggatatatgggagggcattgatgcctatgttgaaaaaggaaatatcttcatagaaaaactggaaagaaacatcctgaggaactgctttgtgacgtctgcatatatctcacaaagttaaaccattcttttgattgagcagtttggaaacacagtttttgtagaatttgcaaaggggtattttggagtgcttcgaggcctatgctgaagatggaaatatcttcagataaataccagaaagaagctttctcagaagccgctttgtgatgtgtgcattcttctcactgagttaatcctttatttcgattgtgcagtttggaatcactgttttggaagtatttgcaaagggatatttaggagtgcattgaggtctatggtgaaaaaagaaatatcttctgataaaaactagaaagaaactttctcagaaaccattttgtgatgtgtgcattcttctcatagcgttaaaactttttttgattgagcagtctggaaaaactgtcttggtagaaactataaagggatacatgtgagcatcttgaggcctatgggaaaagggaaatatcttcagagaaaaactggaaggaaacattctgagaaactgctttgtgatgtgtgcattcatgttacagggttaaaacttcctttttattgagcagtttggaaacactggtagaatctgtgaagagttatttgggagctctttgaggcctatggtgaaaaaggaaatatcttcagatacaaactagaaagaagctttctttgaaacttctttgtgatgagtgcattcatctcacagaggtaaaactttcttttgattgagcagtttggcaacactgattttgtaaaatatgagaagtgatatctgggagtggtttgaggtctatggtgaaaaaggaaatatcgtcagataaaaactagaaagaagctttctgggaatctgctttgtgatgtgtacattcatctcacagagttgaacctttcttttgattgatcatttcagaaactgcttttgtagaatctgtgaagggatatttgggagcattttgaggcctatgctgaaaaaggaaatatcttcagatgaaaactacaaagaatgtttctgagaaactgctttgcaatgagttcattcgtctcacagagttaaacatttcttttcattaagcagtttggcaacactattttttgtagaatctgcaaggtctatggagaaaaagaaaatatcttgagaaaaaactagaaagaagctttctgagaaactgctctgtgatgagttcattcatcacagagagttaagcctttctcttgattaaacagtttggacacactgtttttgtagaatctgtgaaggattattttgtattgccttgaggcctgcggtgtaaattgaaatatctttagataaaaactagaaagaagctttctcagaaactgcttggttatgtgtgcattcatttaacatagataaactttttttgattgagcagtttggcaacactatttttgtggaatctgcaaagggatatttgggagtgctttgaggcctatggtgaaaaaggaagtatcttcagacaaaaactgcaaagaagctttctgagaaactgcgttgagatgtgtgcattcttctcacagaggttttttgtttgtttttttgtttgtttgttgaccagtcttgaaacactgatttgtagaatctgcatagagatatttgggagcagattgaggcctatggtgaaaaaataaatatctttacataaaaactagaaagaagctttctaacaaaccactttgtgatgtgtgcattcttcacacaaagttaaaactttcttttgattgaacagtctggaaacagtctttttgtagaatctacgaagtgatatataggagtggatgaggcctgcagtgagaaaggaaatgtcttcagagaaaaactagaaagaagcattctgagcaacttctttgtgatttctgcattcatctcccagagttaaatctttcttttgattgcacagtttggaaacactgttttggtagaatctgtgaaaggaaatttgggagtgcattgaggccaatgagaaaaaggaaatatcttcagataaaagctacaaagaagctttctgagaaactgccttgtgattagtgcattcgtttcaaaggtttaaacctttcttttgattgagcagtttggcaacactctttttgtggaatctgagaagggatatttgggagtgtttcaagatctagggtgaaaaaggaaatatcatcagataaaaagtacaaggagttttctgggaaactgctttgtgatgtgtgcattcatctcacacagttaaacctttttttgattgagcagtttggaaacactgtttctgtaaaattctccaagggatatttgggagggctttgagtcctatggtgaaaaaggaaatatccttagatacaatctagaaagatttctgagaaacagctttgtgatgtgtgattttgtctaacagactaaatcctttcttttggttgatcagtttgaaaactgtttttctacaatctgtgaatgcatattttggagtgcattgatgcctatggtgaaaaaggaaatatctttacataaaaaactataaagaaatttctgaaaaacagctttgtgatgtgcatattcatttctcagagttaaaactttcttttgattgaggaatttgtaaacactgtttttgtataacctgcgaagggctgttagggagagcattgaggcctatggtgaaaaagaaaatatcttcagataaatattgaaaagaagcttccaaagaaactgctttgtgatgtttgcattcatctcacggagttaaagctttattttgattgaccagtttggaaacactgattttgtattatctttgaaggcatatttgggagtgcattgtggagtatggagaagaagaaaatatcttcagaagaaaaccagaaagaagctttctgagaaactgcattgttatgtgtgcattcatctcacagagttaaaactttcttttgattgagcaggttggaaaccctgttgttggagaatctgtgttgggatattagggagtgccgtgaagcctatggtggaaaaggaaatatctccagataaaaactagaaagaagctttttgaaacactgatttgtgatgtgtgcattcatctcacagagataatcctttcatttcattgagcagtttggaaagactgtatttgtagaatctgcaaaggcatatttgggagcacactgaggcttacagagaaaaaggatacaccttctgataaatctagaaatacgctttgtgagaaactgctttgtgattggggcattcatctcacagagttaaacctttcttctcattgagaagtttggaaacactgtttttgtggaaactgtgaaggagtatttgggactgatttgaggcctatagcaaaaaaggaaatatcttgagataaatttagagagaagatttgtgagaaactgctttgtggtgggtgcattcatctcacatatttgaatctttctattgattgagcagtttggaaacactctttttgtagattctgcaaaggtatatttgggaatgccttgaggcctatggtgaaaaaggaaataccttcagatgaaaactagaaagattcctgagaaacagctttgggatgtgctcattcttctaatggagttaatactgtcttttgatagcgctgcttggaaacactgtttttgcagaatctgtcatgggatatatgggagcacatcgaggcctaaggtgaaaaaggaaatatcttcacataaaaactagaaagaagctttctcagaaaccgttctgtggtgtctgcattcatctcacagatttatagtatgttattttattgaccagtatggaaactgattttgtagaatttgtgaagggatatttgggagcacattgaggtctatggtgaaaaaggaaatatcttcatatgaaaactagaaagaagctttctgaggaactgctttgtgataagtgcattcatctcagatattccaacttttctttagattgaccagtttggaaacacagtttttgtagaatctgcgaagggacattttggagcccatggatgcctaggctgaaaaactaaatatcttcagataaatactagaaagaagctttctcagaaactgttttgtgatgtgtgcattcttctcagagagttaaacctttctttagattgagcactttggaagtacggtttttgcagaatctgtgaagggctaaatgggagtgcattgaggcctattgtggaaatggaaatatttaaagtgaaaaactagaaagaggctttctgagaaaatgctttgtgatgtgtgcattcttctcgcagagttaagcctttgttttgattgtgcagtttggcaacgctgttattgtggaaactaagaagggatatctgggaacactttaagaactaaggtgaaaactgaaatatcttcagataaaaaggataaagaagtttaatgcaaaactgatttctgatgtaggcattcatctcacagagttaaacttatttttaattgagccatttggaaacactgtttttgtagaatctgtgaagatatatttgggagtgctttgaggcctatggtgaaaaaggaaatatcttcagataaaaagtagaaagaagctctttgagaaactgcttgtgatgagttcattaacctcacagagttaaaactttcttttgattgagtagtttggaaacactgtttttgtagaatctgtagaatcctcgaatggatatttgggagcatttagaggcctttggtgaaaaaggaaatatttttgagaaagactagaaagaaactttctgagaaactgctttgtgatgtgtgcattcacctcacagagttaaacttatctttgcatgagcagtttggaatcactgttttggtaggatctgtgaatggatatttcagagcacttacaggcctatgataaaaaaaaggacgtatcttcagataaaaactagaaagaaggtttctgaaaaactgctttgtgatgagcacattcatatcacagagttaaacctttcttttgattcagcaggttgacacagagtttttgtagaacctgacaagggatatttagcagtgctttgaggcctattgtgaaaaatgaaatatcttctgatagaaactagaaagaagctttctgggaaactgccttgtgatgtgtgcattcatctcacaaagttaaacctttcttttgattgagcagtgcagaaacactgttttggtagaatctgtgaagagatattttgggacatacttgggtatatgtttaaaaaggaaatgtcttcagataaaaactggaaagaagctttctaagaaactgctttgcaataagtgcattcatctcatggagttaaaaacttcttttcattgagcagtttgggaacagagtttttgtagaatctgagaagggatatttggtaatgctttgaggcctatggcaaaaatcaaaatatcctcagttaaaaactagaaagaaattttctgagaaactgaattgtgatgagtgcattcgtctcaaagagttaaacccttcttgtgattgagcagttggaaacactcttttggtaaaatctgcaaagggatatttgggaatgctttgaggcctatggtgaaaaaggaaatagcttcagaaaaacactaaaaagaaggtttctcagaaactgctttgctttgtatgcatatttctcaccgagttaaacctttgtattgattggccagtttggaaacactgtttttgtagaatatgcaaaggaatatatgggagcccttgaggcctattgtgaaaaaggaaatatcttcatggaaaaactggaaggaagccttctgagaaactgcgttgtgatgtgtgcattcagctcacagagttaaacctttcttttgattgaccaggttggaaacactcttctggtataatctgtgaagggataattgggagcatattttcatctatggtgaaaaaggaattatcttcagagaaaaactagaaagaagtttcctgagaaactgctttttgatgagtgtattaatttcacagggtgaaacctttcttttgattgagcagtttggaaacaatgttttattagaatctgagaaaagatatttgggagcgctttgagtcctatggtgaaaaaagaaatatctgcagataaaaatataaagaagattttgggaaactgctttgtgatgtgtgcattcatctcacagagttaaacctttcttttgatagagcagttcggaaacactgtttatggagaatctgtaaagggatatttaggcatgcattgaggcttatgttgaacaaggaaatatcttcagagaattactagaaagaaactttctctaaaaccacttgtgagatgggtattcttctcacagagataaacctttcttatgactgagtagtttggaaacactgtttttgtaaaatctgtgaagggatatttgggagtgcattgaggcctatgttgaaaaaggaaatatcttcagagaaaaacaagaaaaaagctttttgggaaaatgctttgtgatttgtgtattcatctcacagagttaaatctttctgtttattgagctgtggttgaaaacactcttttagtagaatctgagaagggaccttagggagcccattgaggcctttggtgaaaaaccaaatatcccaagataaaaattataaagaagctatctgtgaaattactatgtgatgtatggattcatctcacagttttaaaactttcttctgatttaatgggctggaaaccctatttttgtagaatctgtgaagggaaatttgaaatccctttgagggcttatgaaaaacaaaatatccccagataaaaacaagaaagaagctatctgtgaaactaacttgtgatgcgtggattcgtctcacagagttaaacctttcttttgattcagcaatttgcagacactcctttttggaatctgtgaaggaatatttgggagcccatttcagcttatggtgaaatatcaaatatccccagataaaaactagaaagaagctaactgtgagacttctttgtgatataggattcatgtcacaaggttaaaactttgttttgacttagcgagttggaaatattttttgacaaaatctgttgaggtacttggaaacagtgcttttgtagaaacagtgaatggatatttgggactgctttaaggcctatggtgaaagaggaaatgccttcagagaaaaactcaaattaagctttctgagagactgctttgtgatacatgcattcatctcatggagttaaacatttattttgattgagcagtttggaaacactgttgtggtagaatctgtgaagagatatttgggagcactttgaggcctatggtgaaaaactcaataactccagataaaaactagaaagaactatctgtttaacttatttgtaatgtctggatttatctcacagaggtaaacctttatattgattcagcaagttgaaatcactcttttgatagaatctgccaagggacatttcagatcctttagaggcctatagtgaaaaactgaatataccttgataaaaactagaaagaagctatctgtgaaacttcattgcaaagtgtggattcatgtcagagttaaatatttcttttcattcatcaggtgggaaacactcgttttgtagattctgtgaagatacattttggagcccattgagtcctatggtgaacaacccaatatttccagataaaaaccagaaggaagctatctgtgaaactgctttaagacacgtgattcatctcaaagaattaaactttatttttgattcaataggttggagacactcattttgtagaattggagacatgatattttggatcccattgtggcctatggtcgcaaacccaatatcccaagataaaaactaaaaaggagctgtgagtgaaactgctttatgatatttggatttatctcacagagttaaactgttcttctgattcagcaggttgtgaacactctttttgtagaatctgcatagggacctatcacagcccattgaatactatggtgaagaaatggataacccgagataaaaaccagaaagaagctatttctgaaagtgcattgtgattcttgcatttatctcacagtgttaaatctttctattgattcagcaggatggaaacactctttagataaaatgtgcaaatgaacatttataaactcatagaggcctgtggtgaaaaacagaatatccccacataaaaactatcaaaaactatctgtgaaactgctttgttaagtgtggattcagctcaaagggttaaacctttctattgattcagcaggttgcacacgctcttttgctagaatctgcaaagggacatttttgagcccattgtagcacactgtgaaaatggaatattcaaatataaaaactggaaagaagtttttagtgaaacttcttggtgatgtgtggatgctactcacagagtttaacttttctattgattcagcagtttggaaacactcttttggtaaaagcagaaaatggacatgtgggagaactttgagacctatggtaaaaaaaaaaaaatatttccagataaaaattataaagaagctatctgtgaaactgctctatgatgtgtggattcatctcacagagttaaacatttcttttgattcggcaggttggaaacactttcttggcagaatctgcaaagggagatttagaagatttttgaggcctatggtgaaaaacagaatatccacagataaaaactacaaagtagctatctgtgaaactgctttgtggtgtgtggactcatctcccagagataagcctttcctttgattcagcactttggaaacactcgttttgtagaacctgagaagggacattttgaagccgactgagcattggaagctttttgaggcctatggttgaaaacagcatatccacagataaaaactacaaagtagctatctgtgtaactactttgttatgtgtggattcatctcacagagttaaacttttcttttgtttcagcaggctgcaaatatttatgttttgtaatctgcatagtgacatttgggagcccataaaagcctatggtgaaaaatcaaatatccccagataaaaatcagaaagaagctctctttgaaactgctttgtgatgtgtagattcatctcaaagacttcaacctttcttttgactcagcatgttggaaagactcttttggtagaatctgtgaaaggagatttgtgagcccactgtagtctatggaaaaaaaacaaatatttcaaggtaaaaactagaaataatctatcaatgaatctgctttgtgatacatggattcatatcacagagttaaaactttcttttgatttagcaggttggaaaatcctctttgtagaatcttcgaagttacattttagagatctttgaggcctataatgaaaaaccgaaaatccctagataaaaactagaaggaagttctttgtgaaactgtttgggatgtgtttattcatctaacagaattaaacctttctgtcaatatagcatgtttgaatcacatttaaggtagtttctgtgaagggacttttcaaagcccttacaggcctatggtgaaaaacagaatatctgcaaacaaaaagtagagaaaagctaaatatgtaactgcttttgatgtatggattcatctcacagagttaaacctttcttttattgtaacaggttggaaacactcttttgttggaatctgtgaagggaagtttgggaacccatcaaggcctaaggtgaaaaacagaatatccccagataaaaactagaaaaaactctctgtgaagctacttagtcatatgtggattcatctcaaagggttaaacttgttttcaattcaaggggttagaaacactctttttctagaatctgcaaaggcacatttgtgagcccactgtagtctatggggacaaacagaatatcctatgatcaaaactagaaagaggctatgtgtgaaactcccttgtgatgtgtggattcatcccaaagaggtaaacgtttcttttaattcagcaggttgcaagctgtacttttgcagagtctgagaagggacatttgaaagccctttgggttctttggtgagaaaccaaatgtccacagataaaaagtaggaagaaactatctgttaaactgctttttgatatgtggtttcatctcacagtgttgaacctttctttttactcagcaatttggggacagtcgttggttagaatgtatgaggaaatatttgggagctttttgaggcctatggtgaaaaaccgaatatccccagataaagcctagaaaaaagctgtctttgaaactgctttgtgatgtgtgtattcatcttacagagttaaatttttattttgatacagcaggtttgaaactctctttaggtagaatctgtgaagggacatttgggaacactttgagccctatggtgaaaaataaaatagccccagataaacacgagaaagaagctaactgtgaaactgctttgtaatgtatggattcacctcactgagttgaacatttcttttgattcagcaggttggaaaccctctttttggagattctgcaaagggacatgtgtgagcccttagaagcctattgtgagaaacagaatatccacagataaaaactagaaataaggtatcagtgaaactgctttgtgatatgtggattcatctcacagaggtaagcctttcttttgatacagcaggtttgaaagacttttttggaagaatctgcaaagggacatatggaagcccatagaggtttctgttcaaaaactgaatatcttcacataaatactaggaagaagctataagaagctattggtgaaacctctttgtgatgtgaagattcatctcacagagttaaacatttcttttgattcagcagcttggaaacactcgttctgtagagcctgcagagagacatttgggggctcatagagacctaaagtgaaaagcccaatatccccagataaagactcgaaggaatctatccgtgaaactgctttgtgatgtgtggattcatctccctgagttaaacctatcttttgattaagcatgttggaatcactcttttggtagaatctgcaaagtaacatttgggcaccctttaaagcctacagtgaaaaaccgaatatctccaaataaaaacaagaaagaagctatctgtgaaagggctttgtgatgtgttgattcatctcacagatttcgaccttacttttcattcagcatttttagaacactctttatgtagaatcaacgatgggacatttggcagcggttttttggcctctggtgaataactgaatattccaagataaaaattagaaagactctgtctgtaaaacggctttttgatgtgtggattcatctcacagagttaaacattatttttgattcagtagcttgtaaacactcattaggtagaatcagtggaaagacatttgggagcccatagaggcctaaggtgaaaaactgaatatccccagataaaaactagaaagaagctatctctgtaactgttttgttatgtgtggattcatgtcacagagctaaacctttcttttgattcagaaggttgcaaatacttatgtttcataatctgcatagtgacatttgggagcccattaaagcctacagtgaaaaatcgaatatccccagataaaaaccagaaagaagctatctttgaaactgctttgtgatgtgtggtttcatctcatagtcttaaaccttacttttgactcagtattttggaaacactcttttgctagaatccaggaatggagatttgtgagcctactctagtttatggtaaaaataaaaacaaacaaatatttcaagataaaaactagaaagcagctatcagtgaatctgttttgtgatgcgtagattcatctcacagagttaaaccttccttttgatttagcagtttggaaacacctttttgtagaatctgtgaagggacatttgagagaactttgacacctataaggaaaaacaaaaatcctcagataaaaactagaaggaagctctttgtgaaactgttttggatgtgtttattcacctaacagagttaaacctttctgtcaatatagcaggtttgaaacattttttagatagaatctgaagagcccatagaggcctatggtgaaaaacagaatatccccagatagaaagtagaaaaaagctaaatatgtaactgctttgtgatgtgtgtattcatctcacagagttaaatctttcttttgacacagcatatatgaaacactctttagatagtatctgcaaagggacatttaagagcccttagaggcctatggtgaaaaactcaaaaactctagataaaaactagaaagaagctatctgtttaacttatttgtaatgtctggatttatctcacagagataagcatttatattgattcagcaagttggaatctctcttttggtagaatctgccaagggacatttggaatcccttaaaagtctattgtgaaaaactgaatataccttgataaaaactagaaagaagctatctgcaaaactgcatgataaagtgtggattcatgtcagagagttcaacatttattttgattcatcacgttggaaacactcgttttgtacactctgttaagagacattttggagcccattttgtcctatggtaaacaacacaatatttccaaataaacaccagaagaaagctatctgtgaaagtggtttgtgatgtgtgattcatctcacagatttaaacttttttttattcaataggttggagacactcattttgtagaattggcaatgggatattgtggagcccagtgaggcctatggtgaacaatccaatatttccagatgaacaccagaaagaagctacccgtgaaactgctttgtgatgtgtgattcatctcacagatttaaactttttttttgattcagtaggatggagacactcatttttttgaatcaactatgggatattttggagcccattggggcctatggtgaacaatccaatatttccagatgaaaacaagaaggaagctatccatgaaactgctttgtgatgtgcaattcatctcacagatttaaactatttctttattcagtaggaaggagatattcttttttttgaattgactatgggatattttggagcccattgaggactatggttgaaaagaaaatatcccaagctaaaaactaaaaaggagctatctgtgaacctgctttgatgtttggatttatctcacagagttaaacctttcttttgattcagcaggttttaaacactcttttggtagcatctgcatagagacgtatcacagcccatcgaggcctatggtgaacaaatggatatcaccagataaaaactagaaggaagctatttctgagaccgcattgtgatctgtgcatttatctcacagagttaaatctttctattgattcagcaggatgcaaacactctttttgtagaatctgcaaagggacagttgggagcccatttaagcctatggtgaaaaattgaatatccccagataaaaactagaaataaccaatcagcgaaactgcttttttgttgtgtggatgtatctcacagacttaaaaatttcctttgattttgcaggtttgaaacataccttttgcagaatctgtggagggacattttggaaccccttaaggcctgtcgtgaaaaagaaaatattccgagatgaaaactagaaagaagctatctgtgaagtgctctgtgacgtatggagtcattgcacagagctatacccttctattgatacagcaagatggaaacaatctttacatagaatctgcgaaggaacatttataagcccttagaggactatggtgaaaaacagaatatccccacataaaaactatcaagaagctatctgtgaaactgcattgttaagtgtggaatcagctcaaaggcttaaaactttcttttgaatcagcaagttgcagacactcttttgctggaatctgcgaagggacatttgtaagcccattgtagcacactgtgagaaatggaatattcaaagataaaaactagaaagaagcttttagtgaaactacttcatgatgtgtggattctactcacagagttaaactttttattgtttcagcaggttggaaacactcttttggtaaaattgggaaaggcacatgttggagcccattgagacctattgtgaaaaactgaatattcccagatacaaactacaaagaagctatctgtgaaactgctctatgatgtgtggattcatctcacagagttaaacctttcttttgattcagcaggttggaaacacttttttggcagaatctgcaaagggagatttggatctttttgcagcctatggtgaaaaacagaatacccagagtttaaaaactgcaaagtagctctctgtgaaactgctttgtgatgtgtggattcatcacacagagataagcctttcctttgatttggcaggttggaaacccttgttttctaacctgataatgaatattttgaagcttgttgaggcctatggtgaaaaaaaaaatccctagttaaaaactagaaggaagctaccagtgaaactgctttgtgatgtgtggattcaccactgagagttaaatctttcttttcatccagaaaattggaaatattctttagatagaatatgcacagggacatttgggagaccatagaggctaatggtgaaaaacagaatatcctcagataaaaactagaaagaaggtgtctgtgaaactgttttgtgatgtgtggattcacctcacagaattaaacgttgttttgattcaacaggtgtgagaccctcttttcataggatctgtgaagggacatttggaagcccattgaggtttatggtgaaaaaccgaatatttctagataaatactagaaataacctagctgtgaaactgccttgtgatgcgtgcattcatttcacagatttaaacaatccttttgattctgtaaattggaaacactcttatggtagaatctttcaagggacatttcggagcccttagatgcctatgtaaaaaaccaagtatacccagataaaaactagaaagaagctatctgtgaaacagctttgtaatgtttggattcaaatcacaagcttaaacctttcttttgattcagcgggttacaaacaccatttaatagaatctgcgagggtagatttgggaaccatttcaggaatgtagtgaaaaactgaatacacccagatacaaaccagaaagaaactatttgtgaaactgctttttttttttgtggattctcctcacagagataaacatttcctttgattcagcaggttggaaacactcattttgtagaatctgaatggggcattttgaagccctttgaggactatggtaaaaaaaaaataaaaacacaatatcctcagataaaaactatgaagaagctatctgtgagcttttttgtgatgtgtggattcatctcacagaggtaaaagtttcttttgatacagcatgttggaaacactgttttcatagaatcttcaaagtgaaatttaggagctttttgtggagtatggagaaaaactgaatgttcacacatgaaaactggaaagaagctatctgtgaaacagctttgtgatctgtggaatcatctcacagagctaaacctgtctattgaatcagcaagttgcatacactctttttgtagaatctgcgaataaacttttgggagaccattgagcctatggtgaaaaactgaatatccccagaaagcactagaaaaaagtgatctgtgaaactgctttgagttgtgtggattcctttcacagtgtcatacctttcttttgatttaacaagttggaaatactatgttgttagaatctgtgaagggacatttgggagcccatggggtcctatggtgaaaaaccaaatatccccagataaaaaccagaaagaagctatctttgaaactgctttgtgatgtgtggatcatctgaaagacttaaacctttcttttgactcagcatgttggaaatactctttggctacaatctgcaaaaggagatttgtgagcccactgtactctatggcaaaatatgtgtgtgtgtgtgtgtgtgtgtgtgtgtgtgtgtgtgtgtatcagtgagtctgctttgtgatgcatggattcctctcccaaatttaaacatttgtttagattcagaaagttggaaacacctttttgtagaacctgcaaacggaaatttgtgagaccattgaggcctataatgcaaaacagaaaatctccagataaaaactagaagagagctctttgtgaaaccttttggggtgtgtttattcatttgacagaattaaacctttctgtcaatatagcatgtttgaaacattttttggatagaatctgtgaaggttacatttaagagcccatagagacctatggtggaaaacagaatatccctggaaaaaaagtagaaaaaagctaaatatataactgctttgagatgtatgcattcatcaaacagagttaaacctttcttttgacacagtaggtgtgaaacactttatagttagatctgtgaagggacatttaagagcccacagatgcctatggtgaaaaactaaataactccagatgaaaactagaaagaaactatctgtttaacttatttgtattgtttggatttacctcaccaagataaatatttctattgattcagcaagttggaatcactcttttagtagaatctgccaagggacatttgggatcccttagaggcctaatgtgaaaaacttaatataacttgataaaaactagaaagaatcaatctgtaaaactttattgtaaagtgtcatttcatgtcacatagttaaacagttattttgattcttcaggttggaaacactcgttttgtacattctgtgaagagacattttggagcccattgagtcctaaggtgaaaaacccaatatttccagataaaaaccagaaggaagctactatgaaactgctttgtgttctgtgcattcttctcacagagttaaatttttcttttgattcagcagtatggacacactctttttgtagaatctacaaactgatacaggggagcacattgaggcctgtagtgaaaaaggacatatcttcagagaaaaactagaaagaatctttctgagaaactgttttgtgatgtgtgcattcatctcacagagttaagcctttcctttgattgagcagtttgaaagcattatttcagtagaatctgtgaagggatatttgggagcacgttgggggctatggtgaaaaaggaaatatactcagagcaaaacgagaaataagttttctgagaaactactttgtcatgagtactttcatctcacagagttaacactttcttttgattgataagtttggtaacagtgtgttttgtagaatctgagaagggatatttgggagggctttgaggcctatggtaaaaatgaaatatcttcagataaaaactatgaagaagctttctgggtaactgctttgtgatttgtgcattcatctcacagagttaaacatatcttctgattgagcagttttgaaacactgtttttgtagaatctgtgaaaggatatttaggagccctttgatggtgaaaaaggaaatatcttcagaaaaaaacaaaaagaagctttctgagaaactgctttgtgatgagtgcatttatctcacagaatttaacctttctcttggttgagcagtttggaaacactgtttttatagaatctgcaaagagatatttgggagctcactgaaacctatggtgaaaaaggaaatatctacagaaaaatactagaaataagctttctcagaaataactttggaatgtgtgcattcttctcacagaactaaagctttctttttacaaagccatttggaaacactgtttttgaagaatctgcaaaaggatatttgggagcgctttgaggcctatggtgaaaaaggaaatatctccagataaaaacgagaaagaagctttctcagaaactgctttctggtgtgtgcattcttctcacagacttaaaattttattttgattgagctgtgtggacacacactttttgtagaatctatgaagggatacgtgggagtgctttgagccctaacatgaaaaaggaaatatattcagagaaaaactagaaagaagctttctgagaaatggctttgtgatatgtgcattcatctcatggagttaaacgtttcttttgaatgagaggtttggaaataatgttttggtagaatctgtgaagggatatttgggagcgctttgaggactatggtgaataaggaaatatcttcagaaaaaaaaagaagctttctgagaaactgctttgtggtgagtgcattcatctcacagaattaaacctttctattgatcaagcagtttggaaacaatgtttttatagaatctgcaaagggatatttgggagtgcattgaagtctatggtgaaaaaggaaatatccccagaaaaatactagaaagaagctttctctgaaatccttttgtgatgtgtacattcttctcacagaattaaacctttctttcgattgagcagtttggaaacactgttcttgtagaaagttcaaagagatatttgggagtgcattgaggcctatggtgaaaaaggaaatatcttcagattaaaaactggaaagaagacttctagaaattgctttgtggagggtgcattgttcttacagagttaaaccttcattttgattgagcagttgggacacagagcttttgtagaaactatgaagggatatttgggaatgcactgagccctagggtgaagaaggaaatatattcagagtaaaactaggaagaagctttctgagaaactgctttgtgatatgtgcattcatctcatggagttaaacatttcttttgattgagcagtttggaaacactgttgtggtagaatctgtgaagggatatttgagagcaacttgtggtgtatggtgaaaagggaaataatttcagataaaaactagaaagaagctttctgagaaactgctttgtgatgggtgcattcatttcagacttaaccttttcttttgattcagaagtttggctacactgtttgtagaatctgaaaagggatactggggagtgctttgaggccaatggtgaaaagcaaaataactaaaagaagctttctgagaaactgctttgtgatgagtccattcatatcacagagttaaacatttcttttgattgaatagtttggcagcattatttttgtagaatctgagaagggatatttggcagccaattgaggcctatggtgaaaaaggaaatatattcagataaatatgagaaggaagctttctcagataccactttgagatgtgtgcattcttatgagacagttaaacctttcctttgattgagcaatttggaaccactgtttttatagaatctgtgaagggatatttgggagtgcttttaggcctgtggtgaaaacagaaatatcttcagataaaaacaagaaagaggctttctcagaaactgttctgtgatgtgtgcattcttcccacagagttaaacttttcttttgattgagagtttggaacactgtttttgtagaatctacgtagtgatatatggaagcacattgaggcctactctgaaaaaggaaatatcttcagagaaaaactagaaacaggctttctgagaaactactttgtgatgtgtgcattcatctcacagagttcaacctttcttttgattgagcagtttggaaacactgtattggtagaatctgcaaaggtatatttgggatagctctaaggcctactagggtgaaaaagaaaatatcttcagataaaaaatacaaagagtctttttgggaaagtgctttgtgatgtgtgcattcatctcactgacttaacattttcttttcattgagcagtttggaaacactgtttttgtagaatctgtgaattgatatttgggagagcatagtgacctgtgatgaaaaaggaaatatcttcaaacaaaaactagaaagaagctttctgaggagctgctttgtaatgagtgcactcatctctcagagttaaacttttcttttgattgagcagctttggaacagtgtctttgtagaatctgagaagggatatttgggagcgctttgaggtgtaaggtgaaaaatgaaatatcttcagctaaaactagaaagagacttttgggagtctgctttgtgatgtgtacattcatctcacagatttaaacttttctcttcattgagcagtttggccatactgttttgtacaatctgagaaggtgtatttgagagccccttgagacctttggtgaaaaaagaaataccttcagataaaaactagaaagaatctttccaggaaactgctttgtgatgtgggcattcgtctcacagatataaaacttttttttgattgagcagttttgaaacactgtttttctagaatctgggaagggatatttgggagtgcattgtggccaatgggaaaaacagaagaacttcagataaaaactacagaaaactttctgagtaactgcttagtgatgagtgcattcaacccacacagttaaacttttcttttaatacagcaattaagaaacagtgtttttctagaatctgagaagcgatatttgggagtgctttgaggcctatggtgaaaaaggaaataccttcagataaaaactagaaagaagctttctgagacactgctttatgatgagggcattcaactcacacagttaaaccttttttttttttttttttgattgaacagtttgggaacagcgtttttgtagaatctgagaagggatattagggagcactttgaggccaacggtgaaaaataaaatatctccagataaaaactagaaagaagctttctgggaaactgctttgtgatgtgtgcattcatctcccaggtttaaacatttcttttgattaagcagattggaaacactgtcttggtagtatctgcgatgggatatttgggatcactctaaggcctatcttgaaaaaagaaatatattcagataaaaaatagaaagaagctttctgagaaactgctttattatgagtgcattcatcttacacagttaaacctttctttagattcagcattttgggaacagtgtttttgtagaatctgagaagggatatatgggagcgctttgaggtgtttggtgaaaaacgatatatcttcagataaaactggaagaaagctcttaggaatgtgatttgtgatatctgcattcatcttacagagttatgcccttcttttcagtgagcagtttggaaacactgttgttggagaatctgccaagggatatatgggagcccattgagggctacagtgaaaaaggaaatatcttctgataaaaagtagaaagaagctttctaagaaacagctttgtgatgtgtgcattcatctcacagagttaaacgtttcctttgattgagcagtttggaaacactcttttggtagaatctgagaagggatatttgggagcgccttgaggcctatggtaaaaaaggaacatcatcagagaaaaagtagagagaagctttctgagaaactcctttgtgatgtgtgcatacttctcacagagaagagtgttttgaaacactctttttgtagaatttgagacgggatacttgggagtgcattgaggcctacgttgaaaaagtaaatatcttcacataaaaattagtaagaagctttctgagaaaccacttcgttatgtgttcattcttcttccagagttacaattttcttttgattgagcagtgtggaaatgctgtatttgtagaatctacaaagggatatacaggacggcatttagaactatgtgaaaaagtaagtatcttcagaggaaaactagaatgaagccttctgagaaactgctttgtgctgtgtgcaatcatctcacagaattaaacctttcttagaatcgaacagtttgacaagactgtctttgtataatctgcaaagagatatttgggagcacatttaggcctatggtgaaaaaggaaatatcttcagataaaaactagaaagaagattctgagaaaccactttgtgatgtgtggattcttctcatagagttaaactttccttttgatagagcagtttggaaacagattttgtggaatgtaccaatgatatatgggagtgcattgaggtctatggtgaaaaaggtaatattgtcagagaaaaactagaaggaagggttctcagaaactgctttgtgatgtgtgcattcagttcacagagttaaacctttcttttgtttaagccattttgaaacactctttttgtagaatctgtgaagggatatttgggagcacattgaggcttctggtgaaaaaggtaatatctaaggataaaaagaagaaagatgcttcctgatgaactgctttgtgataagtgcattcatctcacagaggtaaacctttcttttgattgagcagttggcaacactgcttttgtggaatctgagaagggatactgggagcactttgaggcctatggtgaaaagcaaaatatgtacagataataactagtaagaagatctttcagaaactgctttgtgatgtgtgtattcatctcagagtttgatctttcttttgattgagcagatctgaaactctttttgtagaatctgcaatgtgatatttgggagcacattgaggcttaaggtgaaaaaggaaacatctttacataaatactggaaagaagctttctcagaaattgctccatgatatgtgcattcttatcacagagttaaacctttcttttgattaagcaatttgcaaacactgtttttgtagaatctacaaagggatatttgggagcactttgaggcctatgatgaaaacagaaatatcttcagataaaaataagaaggaagctttcccaggaactgctttgtgatgtgtgaattcttctcagagagttaaacatttattttgatacagagtgtggaaacactgttttagaagaacctacacagggatatataggagcacattgaggcctatggtaaacgaggaaatatcttctgagaaaaactagaaagaagctgtctgagaaactgctttgggacatgcgcattcatctaacggagttaaaccttctttttgattgagcagtttgtaaacactgttatggtacaatccccaaagggatatttgggatcactttaaagcctagggtgaaaaaggaaacatattcagaaagaatatttcctagaaagaagctttctgggtaacagctttgtgatgtgtgcattcatctcacagaattaaatctgtgttttgattgagcaggttagaaacactgtttttgtagaatctgcaaagggatatttgggagcatattgtggcctatggtgaaaaaggaaatgtcttcagataaaaacttgaaagaaactttctgagaaacggctctgtgatgagtgcattcatctcacacagttaaacctttcttttgattgagcagtttgagaacagtgtttttgtagaatatgagaagggatatttgggagtgctttgagtcatagtgtgaaaaactatatatcttcatgtaaaaactagcaagaagatttctcagaaaccgcatagttttgtgttcattcttctcatagagttaaacctttgttttgatttagaagtgtggaaacactatttttgtagaatctacgaaaggatgtatgggaatgcattgagatctatggtgaaaaagtaagtgtcttcagagaaaaactagaatgaagctttctgagaaagtgctttgtggtatgagcattcatctcacagagttaaaccttttttctgactgaaccatttgaaaacactcttttggtttcaatctgtgaagagatatttaggagcacattgaggcctatggtgaagaaagaaatatcctcagataaaaactagaaagaagctttctgagaaactgctttgtaatgattgcattcatctcactgagttaaacttttcttttgattcagcagtttggtcttactattttgtagaatctgagaaggcatatttgagagtgatttgagtccttgggtgaaaaaggaaatatcttctgataagaattaggaagaagctttctgggacactgctttgtgatgtttgcactcatctcacgtagttaaaactttcttttgattgagcagtttggcaacactgtttttgtagaatctgtgaagtgacatttggaagtgcttcgaggcctaagctgaaaagggacatacctttagaaaaaactagaaagaagctttttgagaaactgctttgtgatgtgtgcattcatctcacagagttaaacctttctttttattgagcagtttggaaacaatttggtacaatctgagaaaggatatttgggagtgcattgaggtctatggtgaaaaaagaaatatcttcagagaaaaaccagaaagcagctttctgagaaactgctttgtgatgagtgcattcatctcagagggttaaacctttgttttgatagagcagtttggcaaaactgtttttgtagaatcagagaagggatttttgagagtgctttgaggactatggtgaaaaaggaaataccttcagataaaaactgggaagaagcattctgggaaactgctttgtgatgtgtgcattcacctcacagagttaaaaactttcttttgatttagcagattgaatatactgttcttgcagaatctacaaagggatatttgggagtgacttgaggcctatggtggaaaaggaaatatcttcagaaaaagactaaaaacaagctttctgagaaactgctttgtgagagtacattcatctcacggaattaaacctttttttaattgaaagtttggaaatactgttttggtagaaactgcaagctatatttgggaacgatttaagtcctagggagaagaaggaaatatcttcagaaaaaactagaaagaagctttctgggaaacctccttagtgatgtgtgcattcacctcacagtattaaatttttcttttgattgagcagtttggaaaccttgtttcagtaggatgtgcaaagagatatttggaagggcattgaggcatatggtgaaaaaggaagtatcttctgagaaaaactaaaaagaaactttctgagaaacttctttctgatgagtgcatttatctcacaaagttaaacctttcttttgattgagcagttgaaaacactgttttggtggaatctgcaaatgcatatttgagagtacttttaggcctagagtgaaaatagaaataacttcagatgaaaactacaaagaaactttctgggaaactgcactgtgatctgtgctatcaacacacaattaaagctttcttttaattgagcagtttggaaacaatgtactcctagatctgtgaagggatatttgggagcgctttgagtcatatggtgaaaagggaaatattttcagaaaaaaattggaaagaagctttctaagacactgcttagtgacgagtgcatgcatcacaaagagataaacatttattttgatcgagcagttggaacactgtttttgtggaatctacaaagagatatttggtgtgaattgaggcctatggtgaaaaaggaaacatcttcagataaatactagaaagaagcttctcagaaactttttttgatgagtccatttttctcacaaagttaaacatttctttggattgaggagtttgtaaacactgttgtggtagaatgagtgaaggaatatttgagagtgcattgaggcttatgataaaaaagaaattatcttcagagaaaaactagaaagaatttttctgagtaactgctttgtgatgagagcattcatctcaaagaattaaaccattctattgattgagcaatttttaaaaacttttggtaggatctgcaaagtgatatttcagaacactttgaggcttatggtgaataggaaatatcttcagataaaagctagaaagaagcttttggggaattgctttgtgatgatttccttcatctcacagggttaaacctttcttttgattgagcagtttggcaacagtgtttttgcagtatctgagaagagacatttggtagagctttgacccctatggtgaaaaatgaaatatcttcagataaaaactagaaagaagctttctgggaaactgctttgtgatatgtgcattcatctcccagagttaaccctttctgttgatagagcagtttggaaacactgtttatgtagaaactgcaagggaatatttgggagcacattgaggcttctggtgaaacaggaaaaactttcagataaatactagaaagaagatttctgagaaaccgctttgtgatgagtgcattcttctcaaagagttaaagctttcttttgattgaacagttttgaaacactgtttttgtagaatctgcaaagggatattttggagcatatgtaagcctatggtgaaaaaggaaatatcttcagataaaaacaagaaagaagcgttctaagaaaccactttatgatgtttgcactcttctcacagatttaaacctttctttttattgagcagtttggaaacactgttttggtagaatctgtgaaggtatattttggattgctttaattcctggggtgaagaaggaaatatcttcagtttaaaactggaaagaaacttcctgggaaactgctttgtgatgtgtaccatcatttcaaataattaaacttttcttttcattgagctctttggaaacaatgtttgacagaacctgggaagggatatttggagtgcattcaggcatacagtgaaaaaggaaatatattcacctaaaaagttgtaagaagctacctcagaaactgctttgtgatgtttgcactcttctcacagagttaaacctctcttttgattgagcagtttggaaacactctttttgtagaatgtgggaggggaaatttgggattgctttaattcctagggtgaaaaagaaaatatcttcagataaaaactagaaagaagctctctgggaaactgctttgtgatgtgtgcattcatttcatagaattaagcttttcattcaattgagcagtttggaaacaatgtttggtagaatctgcaaagggatatttgggagcacattaaggcctatggtgaaaaaggaaatatcttcacataaaaactagtaacaagctttctcagaaaccactttgttatgcattaattcttctcacagagttaaacctctcttttgattgagaaatctggaaacattgtttttgtacaattcacaaacggatatatgggaatgcattgagacctatggcgaaaaagaaaatatcttcagagaaaaactagaatgaagctttctgagaaactgctttgggatgtgtgcattcatctcgtggagttaaacattttttctgattgaaccatttggaaacactgtttcagtagaatctgtgaagggatatttgggaggtcattgaggtctatggagaaaaaggaaatatcttcagataaaaactagaaagaatatttctgacaaactgctttgtgatgaatacattcatctcacagaggtaacttttcttttgattcagcactttggccatactatgtttgtagaaactgagaaggtatatttgagagtgctttgaggcctatggtgaaaaaggaaatatcttcacataaaaactagtaagaagttttctggaaagaaaaaaacaaacaaccccatcaaaaaatgggcaaaagatatgaacagacacttctcaaaagaagacatttatgcagccaaaaaacacacgaaaaaatgctcatcatcactggccatcagagaaatgcaaatctaaaccacaatgagataccaactcacaccagttagaatggcaatcattaaaaagtcaggaaacaacaggtgctggagaggatgtggagaaataggaacacttttacactgttggtggcactgtaaactagtccaatcattgtggaagtcagtgtggcgattcctcagggatctagaactagaaataccatttgacccagccatcccattactgggtatatacccaaagcattataaatcatgctgctataaagacatatatacacgtatgtttatagcggcactattcacaatagccaagacttggaaccaaccctaatgtcccacaatgatagactggattaagaaaatgtggcacatatacaccatggaatactatgcagccataaaaaatgatgagttcatgtcctttgtaggaacatggatgaaactggaaaccatcattctcagcaaactatcgcaaggacaaaaaaccaaacactgcatgttctcactcataggtgggaattgaacaatgagaacatatggtcacaggaaggggaacatcacacaacggggactgttgtggggtgggggaggggagggggacagcattaggagatatacctaatgctaaatgatgagttaatgggttcagcacaccaacatggcacatgtatacatatgtaacaaacctgcatgttgggcacgtgtaccctaaaaataaagtacaataataataaaattaaaaacaaaagctttctgggaaactgctttgtgatgtttgcattcatatcacagagttaaaactttctgttcattgagcagtttaacaacaccatttctgtagaatctgtgaagggatatttgggagcatgttgaggcttatcatgaaaaagacatatcttcagacaaaactagaaaaaagctttctgagaaactgcttcgtgatatgtgcattcatctcacacagttaaaactttcttttgattaagcagcttggaaacactatttggtacaatctgcgaaaggatattttggagtgcattgaggcccatggtgaaaaaggaaatatcttcagagaaaaactggaaagaagctttctcagaaatagctctgtgatgagtgcattcatctcacacagttaaaactttcttttgattgagcagttttgttaaactgtttttgtagaatctaagaagggatacttgagagcactttgaggcctacagtgaaaaaggaaatatcttaaaaaaaattaaaaataagttgtctgagaaactgccttgtgataagagtattcaactgacatagttaaacctttcttttgattgtgcagtttgggaacagtgcttttgtagaatcagagaagggatatttgggatcgttttgaggccaatggtgaaaaatgaaatatcttcaggtaaatacaagaaagaagctttctcagaaactgctttgtgatgtgtgcattcatctcactgagttaaaactttcttttgattgagcagtttggaaacactgttttggtagaatctgccaaaatatattttcgagcctattgaggcctatggtgaaaagggaaatatcttcagattaaaactagaaagaagcattctcagaaaccagcttgtgatgtgtccattcttctcacagagttaaacctttctttagattgagcagttcggaaacactggtttggtagagtgtgcaaaggatatttgggagcacattgaggtctatggtgtaaagggaattatcttcagagaaaactaggaagaattttttggagaaactactttgtgatgtgtgtattcatctcacagtgttaaacttttcttttgagtgagcagtttgtaaacactgtttttatagaatctgtgaagggatatttgggaacacattgaggccaatggtgaaaaaagtaatatcttcagataaaaactagaaagaagctttctcagaaatggctttgtgatgtgtgcacccttctcacagagttaaacctttcttttaattgaacagtttggaaatattgttttgctagaatctatgaaggcatgtttagagaactatgaggactacagtgaaaaacgagatatcttcaattaaaaactggaaagaagatttgcgaaagactgctttgtgatgtttgcattcacctcacagagttaaacctttcttttgattgagcagtttggaagcgttgttttggtagaatctgtgaagggatatttgggagtgctttggggactatggtgaaaaagaaattatcttcagataaaaacttgaaagaagcttcctgggaaactgctttgtgatgtgtgcattcatctcacagaggtaaacttttcctttgattgagcagtttggaaacactgttttggtagaatctgtgaagggatatttgggatcacattgaggcctatgatgaaaaagtaaatatcatcagaaaaaaaaacgagaaagaagcattctgaaaaactgcattatgatgagtgcattcatctcacagagttaaattattcttttgattgagctgtttggaaacactgtttttttgtaatctgagaggggatatctgggagcactttaagacctagggtgaaaaatgaaataacttcagataaaaaacataaagcaactttgtactaaaaattaaaaactagaaattagcttcctgagaaactgctttgtgatatgtgaattcatctcacagaattaagtcttttttttgttgagcagttttttaaaccctatgtttgtggaatttgcggagggatatttgggagagcatagaggcctatggtgaaaaagcatatatcttcagataaaaactacaaagaggctttctcaaaaactgctttgggttcattgcattcttctcacagtgtgaaacctgtcttttaattgagtagtttgcagaaactcctttgtgatgaatatgtgaagggatatttgggaggcatgaggcctacgttgaaaaaacaaatatcttcagataaaaactagaaagaaattttctgagaaactgctttgtgatgaatgcattcatctcactgggttaaaactttcttttgattgagcagtttggaaacactgtctttgtagaatctacgaagggatatttgggagtgcgctgatgcctttggtgaaaaaggaggtatcttcagataaaaagtagcaagaagccttctgggaaactgctttgtggtgtgtttattctcctaacagagttacacctttcttttgattgagcagtttggaaacactgtttttgtagaatctgtgaagggaaacctagaagcgcattgtggcctatgatgtaaaaggaaatatcttgagataaaaactaaaaagaagcattctgagaaactgctttgtgatgaacgcattcatctcacagagtcaatcctatctttggattgagcagttttgcaacactgttttttaagaatcttagaagagatatttgagagtgatttgaggactatggtgaaaaggaaataccttcagataaaaactataaagaaactttctgggaaactgctttgtgatctgtgcaatcatcttctcacagagttaaaaattgcttttgattgagcagtttggaaacaatgttcttgtaggatctgtgaagggatatttagcagtgcttcaaggcctatggtgaaaaaggaagtatcttcagataaaaactagaaagaagctttctgagaaactattttgtgttgagtgcattcatctcacagagttaaagctttattttgattaagcagtttggaaaaactgttttggtagaacttgccaaaggatattttggagcactttgaagcttatggtgaaaaaggaaatatcttcacataaaatctagaaagaagctttctgataaattgctttttgatgattgcattcatcttcttttgatggagatggattcatccatcttctttcgatggagcagttttgcaacagtgtttttgtagaatctcagcagggatatttgggattgcattaaggactaaaatgaaaaacgaattatcttcagataaaaactagaaagaatccttctgggaaactgctttgtgatgtttgcattcatctcagagagttaaacatgtcttttcattgagcagttttgaaacactgtttatgtagaatctgcaaagggatatttgggagcacattgaggctttgggtaaaaaagaaaatatcttcagataaataatataaagaagctttctcagaatctggtttgtgatgtgtgcattcatcacacagagttaaatctttcttttgactgagcagttaaaacgctttttgtataatcggtgaagggatatttgggagcacattgaggactatggtaaaaaaggaaatatcttcagataaaaactagaaagaatcttactcagataatgctttgtgatgtgtgcactcttctaacagagttaaacctttcttttgattgagtagtttggaaacactgttttcgtagaatgtgtgaaaggatatttgggagtgctttgaggcctatggtgaaaaaggaaatatcttcagataaaaactagaaagaagctttctaagaaactgctttgtgatgtttgcattcatctcacagttaaagctttcttttgattgagcagtttggaaactgttttgctagaatatgtgaagggatatttgggaaaatgttgaggtctatggtgaaaaaacaaatatcttcagagaaaaactagaaagaagcttttggaaaaaccgttttgtgattagtgctttcatctcacagaggtaaaccttttttttgtttgagcagtttggagacactgtttttgtggaatttgtgaggggacattaaggagcacattgaggccgatggtaaaaaagcaaatatcttcagataaaaactagaaggaagctttctcagaaactgctttgtgttgtgtgcattcttctcacagagttaaacctttcttttgattgagcagtatggcagcagtgtttttggagaatctcagagggatatttcagagggctgaggactagactgagaaatgaaatatcttcagataaaaactagaaagaagctttcttagaaacagctttgtgatgagtgcattcatctcaaagagttaaacttttcttttgattgagcagtttggcaatggtgtttttgtagaatctgcgaggggatatttgggtgtgcatggaggcctatggtgaataaggaaataacttcagataaaaacttgaaagaaactttcttagaaatagctttgtgttgtgtgtattcttatcatagagccaaacctttcttttgatagagcagtttggaaacactgtttttgtagaatctgcaaaggcatatatgggagccccttaaggtttattgggaaaaaggaaataacttcagataaaattacaaagaagctttctcagaaacagctttgtgttttgtgcattcatatcacagaggtaaacctctcttttgactgagcagtttggcaacactgtttttgtggaatctgcgaagggatatttggtagcacatggaggcctagggtgaaaaagtaagtaacttcagagaaaattagaaagaagcttactctgaaaccgttctgtaatctgttctttcttcttacagagttaaacctttctattgattgagcagtttgaaaacactgttttggtagaatcaatgaagggatatttgggagcgcattgaggcctatggtgaaaaaggaaatatcttcagataagaactagaaagaagcttactcagaaactactttggtatttgtgcattcttctagcagagttgaaactgtcttttgactgagcagtgtgcaaacactgtttttgcagaatctacaaagggatataagggagcacattcaggcctatggtgaaaaagaaaatatcttcagggaaaaactagaaagaagctttctgagaaactgctttgtgatgtgtgcattcatctcacagagttaaacctttcttttaaacactgtattgatagaatctgccaagatttttttgggaatgatttcaagcctattgtgaaaaaggaaatgtcttcagataaaaactagaaagaagcttcctgagaaactgctttgtgatgagtacatttatctcacaaatataaaccattcttatgattgagcagattggcaacagtgtttttgtagaatctgattagggatatttgggatcactttgaggactacagtgaaaaatgaaatatcttcagaaaaaaactagaaagaagctatctggaaaactgctttgtgatgaaggtatttaactcacatagttaaatatttcttttgattgagcagtttgggaacagcgtttttgtagaatcagagaagggatatttgggagtgttttcatgctgatgatgaaaaaagaaatatcttcagatagaaactaaaaagaagctatcttggaaactgatttgtgatgagggtattcaactcacatagttaaacctttctgttgattgagtagtttgggaacagtgtttttgtagaatcagagaagggatgtttgggagcattttgaggccgatggtgaaaaatgaaatgtcttcagataaatactagaaagaagctttctcagaaactgctttgtgatgtgtgcattcatctcacagagttaaacttttcttttgattgaatagtttggaaacactgttttcagagaatctaccaaaggatatttgggggcacattgagacctatgctaacaaaggaaatatcttcagattaaaactagaaagaagctttctcagaaaccggtttgtgatgtgttcattcttctcagagagttaaacctgtcttttcattgggctgtttggaaatactgtttttgtagaatctgagaaatgatatttgagagtgttttgaggcctatggtgaaaaaggagatatcatcagatataaaactctaaagaaactttctgggaaagtgttttgtgatctgtgctgtcatctcacagagttaaacctttgttttgattgggaagtgtggaaacactgttcttgtagaatctgtgaagggatatttgggagcgctatgtaggcctatgttgaaaaacgaaatatcttcagaaaaaaactggaaacaagctttctgagacactgcttggttgtgagtgcatgcatctaacaaagttaaacttttcttttgcttgagaagtttggaaatactgtttttgtagaatctgtgaaggaatatttgggagcaaattgagggctatgttgaaacatgaaatatcttcagataaatactagaaagaagatttcttacaaaccattttttgatgtgaccatttttctcacagagttaaacctttctttggattgagcagtttagaaacactgttttggtagaatgtgtgaagggtatttgggagctccttgaggcctatgatgaaaaaggaattatctccagagaaaactagaaagaagctttttgagaaactactttgtgatgtgtgcattcgtcttacagagttaaacttttcttttgattgagctgtttggaaacactgttttggaagtatctggatagggatatttgggagcacattgaggcctagggtgaaaaaggaaatatcttcagattaaaactagaaagaaactttctgagaaagtgttctgtgatgagtgcattcatctcacagagtgaaaactttcttttgattgagcagtttggcaacagtgtttttgtagaatctgagaagggatatttgggagcaatttatggtctatagtgaaaaaggaaatatcttcagataaaactagaaagaaactttctgggaaactgctttgtgatgtgtgcattcatctaacagagttaaatctttattttgattgagtagtttggaaacattgattttgtagaatagtcaaagggaaatttcagagctttttgaggcctatggtgaaaaagaaaacatcttcaggtggaaacgagaaagaagtgttctgagaaactgcttttcgatgagttcatttatctcagagatttcaacatttcttttgattgagctgtttgaaaaccaagtttttctagaacctgagaagggaaatttgggagcactttgtggcctatgttaaaaaaggaaatatcttcagataaaaactagaaaaacttttataggtaactaccttctgatgtgtgcattcttctcacagagttaaacatttcttttcattcagcagtttggaaacactctttttgtagaatttgtgaagggccattttggagtgcatgaacgtctatggtgaaaaagggaatatcttcagagaagaacaagaaagaagctttcagagaaagtaatttatgatttgcacattcatctcacagagttaaacctttcttttgattgaggagttaggaaacctagtttttgtagaatctgagaaggcatatttgggagtgcattgaggcctatgttgaaaaaggaagtatcttcagataagaactagaaagaagctttctcagaaactgctttgtattgtctgcaatcttctcacagagttaaatcattttttttgattgagcagtttggaaaccctgtttttgtagaatctgccaaggcatataagggagcgccttaaggcttactgtgaaaaaggaaatatcttcagggaaaaactagaaagaagctttcttagaaattgctttgtgatgcatgcatttgtctcacagagttaaacctttcatttgattgaggctttttgaaacactgttttggaagaatctgtgaattgatatttcggagatctttgagccctttgatgaaaaaggaaatatcttcagaggaaaactgcaaagaagatttctgagaatctgctttgtgacatgtgccttcatctcacagttaaaactttcttttgattgagcagtttggaaacactgttttggtagaatttgcaaaggtatatttggaagtgcattgtggcctatggtgaaaaggaaatatcttcaggaaaaaagcagaaataaactttctgagaaattgctttatgatgagtgcattcatctcacagagttaaaccttacttttcattgagtagtttgggaacaaagtttttgtagaatctgagaaggcatatgtggcagttccttaaggcctattctgagaaaggaaatatcctcagggaaaaactagaaagaactttctgggaaactgctttgtgatgtgcacattcatctgacagagttaaaactttcttttgattgaacagtttggaatcactgttttgggggaatctgtgatgggatatttcggagctttttgaggcctatggtgaaaaaggaattatcttcagataaaaactagaaagaagctttctgagaaactggtttttgatgagtgcattcacctcactgacttaaacctttcttctgattgagcagtttggaaacactgtttttgtagtatctgcaaaaggatatttgggattgccttgatgactgtggtgaaaaatgaaatatcttcagataaatagtagacagaatctctcagaaactgctttgtgatgtgcacatacttctcacagagttaaaacattctttgattgggtggtttggaagcactgtttttgtggaatctatgaagggataatttggagcacatggaggcctatggtgaaaaaaaaatcttcagataaataatacaaagaagctttcacagaaacagccttgtgttgtgtgcattcttctcacagagttaaacctttcttttgatttagcagatcggaaacactgttttgtagaatctgcaaagacatatatgggagtgcattaaggcctattgtgaaaaagaagatatcttcagggaaaaactataaagaagctttctgagaaactgctttgtgatgtgtgcattcatctccaagaggtaaacctttcttttctttgacaagtttggaaacactgttgtggtactatctgtgaagggtatttcagagtgcattgaggagcttggagaaaaaggatatatcaacagagaaaaactggaaagaagctttccgagaaactgctttgtgatgtgtgcatttatctcatggtgtcaaacttttcttttgattgaggagtttggaaacactgttttggtagaatctgtgaagggatatttgggagctcattgaggcctttgtgaaaaaggaaatatcttcagagataagaaagaagcattcagagaaactgctttgtgatgtgtgcattcatctcacagagtaaaaccttccattgattgagcagtttggaaacactgttttgttagaatctgtgaaggaatatttggaagtgcattgtggcctattttgaaaaaggaagtatcttcagataaaaactagaaagaagcgttctgagaaactgctttgtgatgagtgaattcatctcacagtgttaaacttttcttttcattgaggagttttgggaacagtatttctgtagaatctgagatggggtattttcaagtccattgtagcctatggtgaaaaaggaaatatcttcagataaaaaatagaaagacggtttctgagaaactgctctgtgatgtgtgcattcttcttaaacacttaaacatttctttagtttgagcagtctggaaacactgtttttgtagaatctacgaaggaatatataggtgagctttgaggtccatggtgaaaaaggaaatatcttcagaaaaaaactagaaaacaggtttctgagaaatagctttgtgatgagtacattgagctcacagctgagtagtttgggaaccgcgtttttgtagaatcagagaagggatatttgggagtgttttcatgctgatggtgaaaaaagaaatatcttcagatagaaactaaaaagaagctatcttggaaactgatttgtgatgagggtattcaactcacatagttaaacctttcttttgatttagcagtttggtcactgtttttgtagaatctctgaagggatatttgggagcactttgaggctgtggtgaaaaacaaaatatctgcagataaaaactagaaagaagctttctgggaaactgctttgcaatgtgtgcattcatcttacagagttaaactttctttttctgagcattgtagaaacactgttttggaagaatctgcaaaaaaatattcaggagcacattgaggccgatggtgaaaaaggaaatatcttcagataaaaaagagaaacaagctttctcagaaaattctttgtgatgtgtgcaattgcatcagagagttaagcctttctttctgagcagtctggaaacactgctttggtagaatctgtgaagggatatttgggagcacattgaggcctatggtgaaaaaggaaatatctttatataaaaactagaaataagctttcttagaatcagctttgtgatgggtgtattcaccatatacagttaaaacttccttttgattgagcagtgtagaaacactgttttggtagaacctgtgaagggacatttggcagtgcattgaggcttatggtgaaaaaggaaacatcttcagataaaaattagaaaagagctttctgagaaactgctttgtgatgagtgcattgatctcactgagttaaaagtttcttttcgttgagctgtttggccacaatgtttttgtagaatctgagaagggatatttggaagcactttgaggccaacggtgaaaaagaaaacaattttcagattcatagaagaaggaagctttgtgggaaactgctttgtgattcgggcattcatctcactgatttaaaattttcttttgattgagctgtttggaaacactgtttttgtagaatctgtgaaggggtatttgggagaaatttgagcccaatggtgacaaaggaaatatcttcaggaaaatactgataaaaatatttaccagaaactgctttgggatgtgtgcattcttctcagagagtttaaccttgcttttgattgagcaatttggaatctctgtttttgtagaatatgggaagggatatttgggagcactttaaaaactatggtgaaaaatgatatatcttcagagaaaaactagaaagaagctttatggaaactgctctgagatgagtacattcttctggcagagttagaacattattttgattcagcagtttgcaaacacagtttctatgaaatctaccaagggatatttgggcgtgtattgaggcttacagtgaaaaaggagatatcttcaggtaaatatgagaaagaagattttcagaagctgctttgtgatgtgtgcattcttctgacagagtttaatctggcttttgattaaacagtttagaaacactgtttttgtagaatctgtgaagggatatttgagagcccttcgaggactacagggaaaaaggaaatatcttcagataaaaactagaaagaagcgttctgagaaactgctttgtgatgtgtgcattcaccatatagacttaaaacattcttttgattgaccagtttggaaactctgtttttgtagaatctgcacagagatatttgggagcgcctttaggacaatggggaaaaaggaaatatcttcacataaaactagaaaaagactttctgagaaactgcttggtgatgagtgactttaactcagagagctaaacctttttttggttaagaagtttgacaaaattgtttttgccgaatctgcaaaaggatatttccgagtgcattgaggcctatggtgataaaggaaatatcttaagattaaaactagaaagaagctttctcagaaactactttgtgaattgtacattcttatcacagagttaaacttttattttgattgagcaatctagaagacctgtttttgtaaaatctacaaagagttgtatgggagggcctagaggcttatggtgaaaaaggaaataacttcagaggaaaactagaaagaagttttctgggaaactgctttttgatgtgtgcatttatctcacagagttaaacctttcttttgattgagcatttggcaactccatttttgtataatctagaagggatatttgggagcactttgaggcctattttccaaaagaaatatcttcaggtaaatactagggagatatttgccgggaaacggctttgtgatttgtgcattcatctcaaggagttaaatggctttgggatgtgtgccttcttctcaaagagataaacttttcttttcatggagctgtctggaaacacagattttgtagaccctacaaggattatatgggagcacatttaggcctgtggtgaaaaaggaaatatcttcagagaaaaactagaaagaagcattctgagaaactgctttgtgatgtgtgcattcatgttacatagttaaaactttcttttgattgaatagtttggaaatactgtttttgtatattctgcgaagggatatgtgggattgtattgaggcctaaggtgaaaaaggaatattttcagagaaaaacttggaagaaactttctgagaaactgctttgtgaagagtgctttcttctcacagagttaaacctttcttttgattgagcagtttggaaacactcttttggtagaatctgcgaaggaatatttgggagcactttgaggcctattgtgataaatgaaatatcttcagataaaaagtagaaagaagcctctatgaaaatgctttgtgatgtgtgcattcacctcatagagttaaacctttctttttattgagaaattttgaaatactcttttgatacaatctgtgaagggatatttgggagtgcattgaggcctacagtgaaaaaggaaatatcttcagataaaatctagaaagaagctttttgagaaactcctttctgatgaatgcattcatctcatcgagttaaacctttcttttaagtgagcagtttggaagcaacattttggtgtaatcagccaagggataattgggagcacattgaggacttaggtgataaagaaatatcttcaaagaaaaactgctttgtgatctgtgcattcacctcacaaagttaaacctttattttcattgagcagtttgggaacagtgtttggtagaatgtgtgaagggatatttgggagtgctttgaggcctatggtgaaaaaggaaatatcttcacataaaactaaaaagaagctttctcagaaactgcttctcattcttcttacagagttaaacctttcttttgattgtgcagtttggaatcactgtttttgaaatatctgcaaaaggatattttggtgtgcattgaggtcaattgttaaaaaggaaatatcttcagataaaaactagaaagaagttactcagaaatcactttgtgatatgtgcattcttctcacagagttaaactttcttttgattgagcaatttggtaacagtgtttttggagattctgagaagagatattttgaagagctttgagtcctatggtgaaaaaggagatatcctcagataataactagaaagaagattcctggaaattgctttgtgatgtgtacattcatctcacagagttaaaccattattttgattgagcagcttgtaaacagtgtttatgtaaaatctaccaagggatatttgggagcactttgaggcctacagtgaaaaaggaaatatcttcagaaaaaaaactagaaagaagcattctgagaaactgctttgtgatgtgtgcattcaacatatggaattaaaactttcttttgtttgagctgtttggaaacactatttttgtagagtctgagaagggactttttggagcactttgaggcttatggtgaaaaaggaaatatcttcagctaaatactagaaagaaactttctcagaaactgctttgtgatgtgtgcattcttctcacagagttaaacctttcttttgattcagcagtttggaaacactgtttttgcgaatctgcaaatggatattgggagagcattgaagcctaggttgaaaaagaaaatatcttcagaaaaaaacaagaaggaagctttccaaaaaagtgctttgtgatgttcgcattcatctcacagacttaaacctttcttttgattgagcactttggcaacagtgtttttgtagtttctgagcagggatacttgggagtgctttgaggtaaatggtgaaaaaaagaaatatcttcagataaaaactaaaaggaatctttctgagaaattgctttgtgatgagtgcattcatctcacagagtttaaactttcttttgattgagcaatttggcaacactgtttgtgtaaaatctgtgaagggatatttgagagtgcattgaggcctattgtgaaaaaggaaacatcagagaaaaaactagaaacaagctttctggacactgttttgtgatatgtgctttcccaatgctgtgaacatctgcttctctaggataggaatattgattatgtgaaacctccctaaatgcacgcttgtttataggctctctgcagggggaaacacatcatgtgttgttggcttattctggcatcccaacctggcattgtctttacacaatccaacatgcaattttgtatttacaataatcaggagcatttcatcttttatcctgtagcaatagtttcaggggttccccctacacatttggaagcccataaaggcatatggcaagaaaccgaatatctccagataaaagctagaaagaaggtacctgtgaaagtgtcttgtgttgtgtggattcatatcacagagttaaacatttctttgcatgtagcagttttggagcactctttaggtagaatcagtgaagaaatatttggggccatggaagcctataatgaaaacctgaacatccccagataaaaactaggatgaagctgtctgtgaaacttcttagtgatgtgtgaattcatctcacagaattaaacatttgatttcatacagcagatttgaaacacttgttggatagaatctgcgaagaggcatttggaaacccatagaggcctagggtgaataaccaaataaccacagataaaaattagatataagctatctgtgaaactgcattgtgatgtgtggattcacctcacacagttaaacatttgttttgatctggcatgttaaaaacacttttttttctaggatctgtgaatgaaagatttggagtccattgaagcctatggggaaaaaatgaatattaccagataaaaactagaaagaagctatctgtgaaactgttgaaggaagtcagagaccccaaacagagggagcagctgaagccatggcagaagaaggtggattgtgaagattttatgaacatttattagttccccaaattaataactttataattttttatgcctgtctttacttcaatctctaaacataaatcgtaaagatttcttggacatttatcacttccccaatcaatatccttgtgattacctatgcctgtctttacttcaatctcttaatcctgtcagctgaggaggatgtgtgtcccctcagaaccctatgataattgcattaactgcacaaattgtagagcatgtgtatttgaactgtaagaaatctgggcaccttggaaaaagaacaggataacagcaatgtttaggaaacaagagagataaccttaaactctgatcaccagtgagccaggtggaacagggccatatttctcttctttcaaaaacaaacgggagacatatcactgaattctttttctcagcaaggaacatccctgggaaagagaatacacacctgggggtaggtctacagacggcccccctgggtgtggtcgtcttttatggtcagtagactgttgggatgaaatagaacccagtctcccatagtgctcccaggcttattaggaagaagaaagtcccacctaataaattttggtcagaccggttgctctcaaaactctgtttcctgataagatgttatcaatgacagtggtgcccaaaacttcattagcaattttaattttgccccagtcctgtggtcctgtgatttcaccctgcctccatttgccttgtgatattctattaccttgtgaactacttgatgtctgtgacccacaccctattcctatactccccttttgaaactccctaataaaaacttgctggttttacggcttgtggagtatcacagaacctaccaacatgtgatgtttcccccggacacccagctttaaaatttctctcttttgtactctgtccctttattctcaaatggccaatgcttagggaaaatagaaaagaacctacatgactatctgggcaggttcaccggtatctggtgcccatgtagtctttcttttttcttaagtgcatgagggagcccaattccctttggtaggtgtggtgaaacgtcatcagcttggtccacagatacacgtgtttgactccctgatgagtggtgagtagtctgtgtatggtctgggttaactatgagtcatgtggagtctatgcatcatacttatctctgctatactaaactcctgttaaaacagggcggtatttgagtgcctatggaaaatatggtcactctattcagggcagtagaaaaatactgtccttggtttcctgaaaaagaaaccttaggtgtagaactatgggatcatgttggtacaacattcagggaactggtctccacagggaattatgttcccatcactgtttcgggtgactggaccttggtatgtgctgtcctgatgacataccaatcctgtggccccttacagttaccacaattttctgaatctgatgatcctccacattttcctcagccttactctcctgcacagctttcattatctgaacagcctctctctccagctactcctcccctacctgacaatgtagggaattcaatgtctaactccggtaactttgacttatggtcaccccttgatgatcttatttcttttcatgaagagccagtacgtgtaactcctgtggccctgactcacacagccaggatcctatatatgctaatccttctcttctcaaacctccagatcacctagtggctctgggaccaaactaccaaactacactttacctataattctgcaggccctgccccatccacttcagcccctcaacctcctgtcattttggttcctcaactggtcactttactgtccactcagcctgcttctctgtactcttcttcacatgtgaacaccagtaatcaccagtatacttctgctcctccaatgcccctttctcacactctcattctggtccaaccctctcaccctcagtttcccttatctacacatgcttttcctgtcacttctatgccgactccgtctcagatgcctactcatgaaacttcaatgcaatgcttattacgccaaaacaaagaaacaagtggattagatacatggacttatctggtcatgctaggcccacctaacttccaagggttacaaatgcatcattatgtacctcttactcttacatttttttaagaatttaaggatgcttgttcaagtatggtcctacttctccttatgttaaaatggttttacaaactttttgtactgagttcactttacttccttttgattgggacctgttggcaaaagctgttctaaccccagctcatcatttacaattctgtatctggtggtcagaggaggcccttttgcagactcagctaaattggagtaatggcattctaattactcaggctcagctcacaggctccaatagtttctctgatgcttatgcccaattaaactttgatgcccttaccacagaacaagtaacaaaggtgtatatgagagtttgagataaattatgcactccaggccaagcttctgtttcttttaccatggttaaacaaggtcactctgaattataccctgattttttagctaaattacaagatgctgttgaaaaatctgtctctgatgagcatgctcaaggcattctccttcgtatgttagcttttgaaaatgcaaaccgtgaatgtaaaatggccatgcgttctgtgtaatgacaaaatttacctgatcacgaggtgttgctagcatgtattaaagcttgtgaaggcattggatcagacacccacaaagctattctgtgggcatgggccatgaaggacatcaaccaaactggtcccactaattcttctcttgcagcatgctataattgtggccaacttggtcatattcgaaaaatttgtgctgttaaaaacttacaagtggccaagctggttcaacaaacacagacaaatcctgctcctattgtttgtccacgttgtcacaaaggtaaacattggcaaatatttgtcactctaagtatgatatagatggaaaccctctaccacaatgtcagggaaattgggagcagggctgatcccaggccctgacatcaaatgggacacttccaactcagaccaatgttgtgtttccacttctggtggtcccaacgcaacctgcagcacaaacaaatctacctacagccaaaccatatgggtcccagcctcttcttctgtctccgtacaatgattgtccatctccatattaaaaggtggggcagtggatctctgtagtactattcctctgaatttacttcctgattctttgcccttggttgtccccacgggggtcactggccctttacttcaaggttcggtgggcctggtgttaggtagggcatccaccactgctaaaggaatcaccattcatactggtctcattaattctgattctgttgatgagattaaattaatcatttctgccaaggtttctgtttccattccagccagtgagtcagttgctcaattgcttttactacctaatatcattttaaagatttgaaacactggttggatagaatctgcaaagggacatttggaaacccatagaggcctagggtgaataacaaaataaccacagataaaaactagaaataagctgtctgtgaaactgcattgtgatgtgtggattcacctcacacaattaaacatttattttgatacagcatgttaaaaacactcttttctagaatctgtaaaggaaagatttggagcccattgaggcctatggggaaaaaacgaatattaccagataaaaactagaaagaaactatctgtgaaactgctttgagatgtgtggattcttcttacagttttaaaactttcttttgatgcagttggttggaaacacttttttggtagaatctgagaagggacatttgcaaacccattgaggatatggtgaaaaactgaatatcccaacataaaaactagaaagaaaccgttaatgaaactgcttggtgatgggtggattcacctcacaaaggttaaccttttttttttattcagcaggttggaaacactcgttttgtagaacctgcaaaaggacatttgggagtccactgaggtctatgttgaaaaatggaatatcgccagataaaactagaaagaggttatcaatgaaactgtattgtgatgtgtcgattcttctcacaaagttaagcatttcttttgattcagcagcttggaaacactttttgtagaagctgcaaagggacatttgagagcccatagaggtctatggtgaataaccaaatatcttgaggtgaaaactagaaagatgctatctgtgaaactgctttgtgatatgtggattcatctcaaaaagttaaacatttcttctgattcagcaggttgcaaacactttttttgtaaaatcagtgaagggacttctggagccctttgaggcctactgtaataaaccaaatatttccataaaaaaataagagagaaactatctgtaaaactgctttgtgatgtgcttattcatctcacagagttacacctttcttttgatactgcagcattgaaatacactttagtattcaccaatctgtgaatggacattttggagcccttagaggcctatggtgaaaacccaaatatatccagataaaaacttcaaagaagctatctgtgaaaattctttgtgatgtgaggattcatctcacagagctaaaactttctttttcttcagaagtttggaaacattattttggtaaaatctgtgaagggacacttgggagcccattctgaaaaattgaatatccccagaaaaaaaaaacccaaaaatctatctttgaaaatgctttgtcatgtgtggattcatctcaaagagataaacctttttctaattcagcatgttggaaatgctctttggatagaattacaaagggaaagtttggagcatatagaggcctatatagtggtgaaaacttaatatccccagataaaaactacaaggaagctatcattgaaagtgctttgtgatgtgtggattcaactcacaaaattaaacttttctttttgattcaggagtttgcaaatacttcctttccagagtctgggaagggatatttgagagcccattgatgcctatggtgagaaactgaatatcaacagataaaaactagttagaagctatctgtgaaactgctttgtactgtgtggattcatcttacagagttaaacatacgttttgattctggaggttggaaagacacttcaggtagaatctgcgaagggacatttgggagcccattgacgctgatggtttaaaactgaatattccaaggtaaaaactataaaaaacaatctttgaaactgcattgagatgcgtggattcatctcagagttcaacttttcttttgattcagcaggctgcatacacttttttggtataatctgtgcagggacatttgggagccctttcacacctgtcatgaaaagccaaataatcccaaataaaaactagacagaaactacctatgaaactgtattgtggtgtgtggattcatctcattaatttaaacctttcttttgatgctgcagattgaaaaactcttttggaagaatctgcaaagggacatttggaagcccatagaagatgattgacaaaaaccaaatattccaagatgaaaactagaaacaagctatatttaaagctgtattgtgatgagcagcttcatctcacagagtcaaacctttctttggaaacagcaggatggaaactctctttttgtagaatcttcaagggacatttgggagcccttttaggcctatggtgaaaaaccaaatatccccagacaaaaactagaaacaagctatctgtgaaactgctttgtgatgtgtggattcatgtcacagatttcaacctttcttttcattgagcgagctgaaaacactctttttttttttttttggaatctgcaaagggaaacatgggagcccataaaggcctgtggtgaaaaactgaatatccccagatgaaaactagaaacaagctgtctgtgaaactgcatggtgatgtgtgatttatctcccatagttaaacatttcttttgattcagcaggttgcaaacactgttttagtagaatctgtcaaggtatatttgggagcctattcaggcctatggtgaaaaaccgaatactttcagaaaaaattctgaaagaagctatctgtgaaactgctttttgatgtgtggattcatctcacagagttaaacatttctttagatacagcagttttgaaatattctttaaatagaatctgtgaagagacgtttttaagcccctataggcctaagttgaaaaacagaatattgccagataaaaactagaagaagctatctgtgaaactgctttgtgatgtacggattcatctcacagaattaaacctttcttttgattcagcagcttggaaatacttttttggcacaatatgccaaggtacatatgggagccctttgaagcctatggtgaaataccgaatatctccggataaaaactagaatgaagttatctgtaataatagtttctgacgtgtggattctttgcagagtttaaagtttatttgattcagcaggttgcaaacactcctttgctagaatctgcagagggacattccaagtctactgtagcctatggagtaaaacagaatatcccaggataaaaactagaaagaagctatatgttaaactgctttgtgatgtgtggattcatctcacagagttaaaggtatcctttgcttaagtagcttgcaaacactccttttgtaggatctgccaagggacatttggtagtactttgagaactgtagtaaaaaaccgaatatcctcagataacaacaggaaagcagctatagttacaactgccttgtggtgaacgcattcatctcacacagttaaacctttcttttgatttagctgtggttgaaaacactctttttgtagaatctgagaagggatctcagggagcccattgaggcctttggtgaaaaacaaaatatccccagaataaaattagaaagaagctatctgtgcaattgctttgtgatgtgtggattcatctcacagttttaaaactttcctctgatttaacggctggaaaccctatttttgtagaatctgcaaagggatatttgaagtccctttgaggcctcttgtgaaaaactgattatccccagataaaaacaagaaagaagctatctgtgaaaccactttgtgatgtgtggattcatctcacagagttaaacctttcttttaattcacctatttgcatacactccttttgtagaatctgtgaatgaatagttgggagcccatttcagcctatggtgaaagttaaaatatccccaggtaaaaactagaaagaagttaactgtgagactgctttgtgatatgggaattcatgtcacagagttaaacctttgttttgactgagcatgttggaaataatcttttggcagaatctgttgaggtacattagggagccctttgcaggttatggtgaaaaacaaaatattcccagataaaaagttggaagaagctatctgtgaaactgctttgtgatgtgtggattcatctcacagagttaaacctatctttgattcagcagtatgaaacactctttcacagaatctgcgaaaagacattagaaggcgaatgaagcatacagtgaaaaaccgaacatccccagataaaaactagaaaagagcaatctgtgaaactgctttgtgaagggtggatgcatctcacagagttataccattcctttggttgggtaggttgcaaatacttcttttgtagaatctgcaagggacattcaggagcccatcgaggactatggtgaaaaacaaatttccccagataaaaattcgaaagaaactatctgtgaaactactttgtgatgtgtggattcatctcaaagagttaaacccttctttagtttcagcaggttggaaacactcgttctgtagaatctgcaaagggacatttgtgagtcaattgagccttatgatgaaaaaccgaatatacgcagataaaaactggaaagaagctatctgcgaacctgctttatgatgtgtggattcaactcacagtgttaaacctttcttttcattcagcagcttgcaaatactctttttgtagtatctgaaaagggacacttaggagccctttgaagactgtagtgaacaacttaatatcttcacataaaaaccagaaagatgctatccgtgaaactgcttttttgatgagtggattcgtctcacagagttaaacctttcctttgattcagcaggttggaagcactcattttgtagaatctgcaaaaagatattttgaagcccattgtggcatatagtgaaaaacccaatatccccagataaaaactagaaagaagctctttgtgaactgctttgtgatgtgtggattcatctcacagaggtaagcctttctttcaatttaccgtgttggaaacactcttttggtaaaatctgcaaagggatatttgggagccttttgtggcctatcgtgaaaaaccaaatgtccacaggtaaaaacactcattttgtataatatgctaagtgatatttggaagcccattgaggcctatggtgaaagagagaatatcaccaggtatctgtgaactgctttgtgacgtctggattcatctcaaagagctacaactttccttaatacagtgtgttggaaacactcttttcgtagaatctgcaaagccctttgaggcctatggtgaaaaaccaaatgtccacaaataaaaactagaaaggagctatctgtgaaattgctttgtgacgtgtagatttctctcaccaagttaaagctttcttttgatacagcaggattgaaacactctttagctagaatttgtgaagggacatttgaaagcccatagaagccattgttgaaaaacagaatatccccagataaaaaccagaaataagctatctgtgaacctgcttttttatgtgtggaatcatctcagagagttaaacctctcttttgattcagcaggttgtaaacatctgctagtatctgagaaaggacgtttgtgagcccaatgtagcacactgtgaaaaattgaatattcaaagataaaagctagaaagaagcttttagtgaaactacttagtaatgtgtggattctactcacagagtgaaacttttctattgttcagcagtttggaaacactcgtttggtaaaatcaggaaattgacatgtgggagcccattgagacctatggtgaaaaaccgtatactcccagataaaaacaataaagaagctacctgtgaaactgctctgtgatgtgtggattcatctcacagagtcaaacatctattttgattaagcagtttggaaacacttgtttggcaggatctgtgaagggagatttggaaactttttgaggtctatggtgaaaagcagaatatccacagatgaaaacaacaaagcagctatctgtgaaatggctttgtgatgtgtgtattcatctcagagggataagcctttgctttgattcagcaggtgggaacactcgttttgtagaactgtgaagggatattttgaagcccatttgaggcctatggtgaaaaaacaataaccccagttcaaaactagaaggaagctacctgtgaaactgctttgtgatgtgtggattcaccactcagatttaaacctttcttttgatacagcaaatttgaaatactctttaggtagaatatgtgaagggtcatttgggagcccatggggacctagggtgaaaaaataatatccccagataaaaactagaaagaagctatctgtgaaactgctttgtgatgtctgtattcatatcacaaagttaaaactttctttgattcagcagttacaaacactctttttatagaatctgcgaaggtacatatgggaaccctttcaggaatgtagtgaaaaaacaaatacacacagatacaaaccagaaagaagctatttgtgaaactgctttttttttttttgtggattcatctcatggagatgaatttcctttgattgagcaggttggaaacactctttcatataatctgaatggggcattttgaagccctttgaggactatggttaaaaaaaaaacacagtatccccagataaaaactaggaagaagctatctgtgaacttttttgtgctattttgagctatttgtgaaactgttttgtgatgagtggattcttctcacagagttaaaccttttcttttattaaccaggtttgaaacactcttttggtagaatatgggaagggaggtttggaatccaatagagaactatggtgaaaaaatatccccagatgaaaactagaacgaagctctctgtgaaactgcttagtgatatgtagattcatctcaaagggttaaacttgtttttgattcactaggttagaaacactctttttctggaacctgcaaagggacatttatgagcccactgtagtctatcgtaagaaaccaaatatcccaagatcaaaactagaaagaggttatctgtgaaacttctctgtgatgtgtggattcatcccagagagttgaacctttcttttaattcagcaggttgcaaactgtacttttgcagagtctgtgaagataattttgaaagccgtttgagtcctttggtaagaaaccatatgtccacagataaccactaggataaaagtatctgttaagctgctttgtgatacgtggattgatctcacagagatcaacatttcctttgattcagaaggttggaaacactcgttttgtagaatctgcatggggcattttgaagccctttgaagcctatttaaaaaaatacaatatctccagataaaaactaggaagaaggtatctgtgaacttctttgtgatgtgtggattcatctcacagaggtacatgtttcttttgttatagcatgttggaaacactgttttcatagaatctgcaaagagaaatttgagagctttttgtggcccatggtgaaaaaccgaatgttcacggatgaaaactagaaagaagctatctgtgaaacagccctgtcgtctgtggattcatctcacagagataaacctgtctattgaatcagcaagttgcgtacactctttttatagagtctgcaaagaaattttgggagtccattgaggcctatgatgaaaaacgaatatccccagataaacactggaaaaaaaagtgatctgtgaaactgctttgtgatgtgtggattcatctcacagggttaaacctttctttggatttaacaggttggaaacactctttggttagaatttgtgaaggaacatttgggagcccctggaagcctatggtgaaaaacaaaatatccccagattaaaaccaggaagaagctgtctttgaaactgctttgtgatgtgtggattcctctcaaagacttaaatctttctttttactcagtatgttggaaacactcttttgctagaatctgcaaaatgagatttgtgagcccactgtagtctagggtaaatatatatatatgtatttcaagatagaaactagaaagaagatgtcagtgaatgtgctttgtgatgcgtggattcatctcacagagttaaaattttattttgattcagcaggttggaaacacctttttgtagaatctgccaacagaaatttgagagacctttgaggcctagaatgaaaaccagaaaatccccagataaaaactagaaggaagctctttctgaaactgtttgggatgtgtttattcatctaacagagttaaacttttctgtcaatatagcatgtttgaaatattttttagatagaatctgtgaagggacatttaagagcctatataggcctatgatggaaaacagaatatcccaagataaaaactagaaaaaagctaaatatgtaactgctttgagatgtatggattcaactcacagagttaaacatttctttaaacacagcagctatgaaacactttttagttagtatctgtgaagggacatttaagagcccgtagatgactacagtgaaaaactcaataacttcagatgaaaactagaaagaaaccatctgtttaactgatatgtaatgtctggatttatctcagagagataaacatttctattgatttagcaaattggaatcactcttttggtagaatctgccaagtgacatttgggatcccatggaggcctactgtgaaaaactgaatataccttgataaaaactagaaagaagctatctgtgaaactgcattgtaaagtgtggttttaggtcacagagttaaacatttcttttgactcatcaggtaagaaacactcgttttgtagactctgtgaagagacattttggagcccattgagtcctatggtgaacaacataatatttccagataaaaaccagaaggaagctatctgtaaaacccctttgtgttgtgtgcattcttcttacagagctaaacctttattttgattgaacaatacggacacacagtttttgtggaatctacgatgggatatatgggagcacattgagacctacagtgaaaaaggaaatatcttcagagaaaaactagaaagaagctttctaagaaactgctttgcaaagtgggcattcatctcacagagttaaactttcttttgattgagcagtttggaaacagtgttttggtagaatctgcaaagggttatttgggagtgcattggagactatggtgaaaaaagagatatcatcagagaaaaaccagaaagaagctttctgagaaactgctttgtgataagtgcattcatctcacagagttaacactttcttttgattgagaagtttggcaacaccgtttttgtagaatctgagaagggctatttgggaatattttgaggcctatggtgaaaaaggaaatatctacagaaaaatactagaaggaagctttctcagaaatccctttgtgatttgtgcatccatctcacagagttaaacgtttcttttgattgagcagtttggaaacactgtttttgtagaatctgcaaagggatatttgggagtgctttaaggactgtggtgaaaaaggaaatatcttcagaaaaaaacaaaaagaagcttcttgagaaattgctttatgatgagtacattcatctcacagaattaaacccttctattgaatgagcagtttggatacactgcttttgcagaatctaaaaagggatatttgggagcacattgaagcctatggtgaaaaataaaatatctaaagaaaaatactagaaagaaactttctcaaaaatcccttagtgatgtgtgcattcttctcacagaattaaaccttgcttttgattgagcagtttggaaacactgtttttgtagaatctgtgaaaggatatttgggagcgctttgaggcctatggtaaaaaagaaagtgtcttcagataaaaactacaaagaatcttctcagaagctgcattgtggtgtgcgcattttctcacagagttaaatctttattttgattgagcaaattggacacaccctttttatggaatctaaaaagggatacttgggagcccattgggccctagggtgaaaaaggaaatatattcagagaaaaacagaaagaagctttctgagaacactgttttgtgatgtgtgcattcacctcaaagagttaaacatttcttctgattaagaggtttggaaacactttttttgtagaatctgcctagggaaatttgggagtgcattgaagcctatagtgaaaaagaaactatcttcagaaaaatactagaaataatttttctcagaaatccctttgtgatgtgcacattcttctcacagaattaaacttttcttttgattgtgcagtttggagacactatttttgtagaatctcagaagggatatttgagagctctttaaggcctatggtgaaaaagaaaatatcctcagggaaacactagaaaaaaaaatcctgagaaattgctttgcaaagtgtggattcatatcacagagttaaacctttttttgattgagcagttgtaaacactgttttggtggaatctgcaaagggatatttgggagtgccttgaggcccaaggtataaaaggaaatatctacagatcaaaactagaaaagctttctgagaaactgttttgtgatgtgtgcattcatctcacagagttaaacctttcttttgattgtgcagtttggaaacactgtttttgcataatctgtgaagggatatttcagagcactttgaggcctatggtgaaaaaggaaatatcttcacataaatactagaaggaagctttctgtgaaactgcttttggatttgggcattcatctcacacatttaaacgtttcttttgattgggaagtttggaatgactgtctttgtagaatctgtgaagggctatataggagtgcttcgaggcctatggtgaaaaaggaaatattttcagaaaaatactagaaagagactttctcagataccactgtgtgatgtgttctttcttttcacagagttaaatgtttcttttgattgagcagtctggaaacactgtttttgtagaatctacataggtatgtattggagcacatagaggcctatggggaacaaggaaatacgttcagagaaaaactagaaagaagctttctgagaaactgctttgtgatgtgtgaattcatgtcagagttaaactctttttttttgattgagcagtttggcaacactgtttttgttgaatctgaaaagcaatatttgggggcgcattgagtcctatgccaaaaaaggaaatatcttcagataaaaactagaaagaagctttctgagaaatggctttgtgatgtgcgcattagtcccactgagttcagcctttcttttgattgagctgtttataaacactctttttgtagaatctgcaaaaggatctttgggagtgctttgaggcttatggtgaaaaaggaaatatcttgagaaaaactaaaaagaagctttctgagaaactgctttgtgatgagtgcattcatccctcagaattaaacttttctatttactgagcaatttggaagcactgtttttgtagagtctgcaaagggatacttaggagctccttgaatcctatggtgaataaggaaacatcttcagataaatactagaaagaagctttctcagaaacccgttggtgatgtgtgcattcttctcacaaagttaaacctttccttgattgagcaatttgtaaacactgtttttgtagaatgtgtgaaaagatattttggagcaaattgagttctatggtgaaaaaggaaatatcttcagaaaaaacgagaaggaagctttcacagaaaccaccttgtgatgtgcacattcatcttatagagttaaaactttgttttcatttagcagtttggagacactgtttctgtacaatctgcaaagggctatttgggagcttattgagacctatggagaaaagggaaatatcttcagagatgaattagaaagaagctttctgagaatctacttggtgacaagtgaattcatctcatggagttaaacattccttttgattgagcagtttggcaacagtgttttgtagaatctatgaagggatattttggaacacttagaggcctatggtggaaaatgaaatgtattcagagaaaaactagagagaagctttctgagaaactgctttgtgatgagtgttttcctctcacgaattaaaacgttcttttgattgagcagtttggaaacactgtttctgtaaattttaccaaggtgtatttgggaacgcattgagacctatggtgaaaaaggaaatatcttcaaataaatactagaaagaagctttctgagaagctgctttgtgatgagtgtattcaccatatagagttaaaactttcttttgatagagcagtttggaaacactgtttctgtaaattttaccaaggtatacttgggagcacattgaggcctatggtgaaaaaggaaatagcatcagataaaaactagaaagaagctttctgagaagctgctttgtgatgtgtgtattcatgatacagagttgaaacttagtttggaaaaactgtttttgtaggatctgcgaagggatgttgggagcatattgaagcctacagtgaaaaagtaaatatcatcagataaaaactagaaagaagttttctcagaaactgctttgtgctgtgtgcattttctcacagagttaaacctttcttttgattgagaagtttagaaatactatgttggtaggaaattcaaagggatatttgggagcgacttgaggcctatgttgaaaaaggaaatatcgccagataaaaactacaaagaagttttctcagaaacttctttgtgttctctgcattcttctcacagatttaaaactttcttttgattgagcagtttggaaacactgtttttgtagaatctgcaaaggcatatgtgggagcccattaagacttactgtgaaaaaggaaatatcttaagggaaaaactagaaacatgctctctgagaaactgtttgtgatgtgtgcattcatatcgcagagttaaacttttcttttgctaggacagttgggaaacactgttttggtagaatctgtgaggggatgtttgggactgcatagtggcctatggtgaaaaatgaaatattttcagataaaaagtagaaagaatctttctgagaagctgctttgtgatgaatgcattcatctcagagggtttaaactttctttgactgagcagtttggcaacagtgtttttgtagaatctgagaaggaatatttgggagcgatttgaggcttatgttgtaaaaggaaatatcttcagataaacactgaaacaagctgtctgggaaacatttttctgatgtgttcattgatctcacaaagttaaacctttcctttaattgagcagtttggaaactctgttttggtagtatccgtgtagcaatatttgggagctcattgatgcctatggtgaaaaaggaaatatcctcagataaaaatgagaaagaagctttgtcagaaactgctttgtgatgtgttcattcttcccacatagttaagcctttcttttgagttagcagtgtggaaacactgtttttgtagaatctacaaaaggatataagggagcctattgaggcctatggtaaaaaaggcaatatcttcaaattaaaactagaaagaagtattctcagaaaccactttgtgatgtttgctttcttctcacagtgttaaatctttattttaatgatgagtagtttggaaacactgttttggtagcatctgtgaagggatatttgggagctgtttgagtcctatggtgaaaaatgcaatatcttcagataaaaactagaaagaagctttctcagaaacagctttgtgatgtgtgcattcttctcacagagttaaatctttcttttgattgatcagtttggaaacactgttttggtagcatctgtgaagggatatttgggagctctttgagaactatgtggaaaaaggaactctcatcagatgaattctagaaagaacctttctgagaaacagctttgtgatgagtgcatttgtcttaccaagttaaacctttcttttgattgagcagtttggaaacacagtatttgtagaatctgataagggatatttgggagcattttgaggcctaaggtcaaaaacgaaatatcttcagataaaaactagaaaggagctttattttttaatactttaagtttcagagtacatgtgcacaacgtgcagtgttgttacatatgtacacatgtgccatgctggtgtgctgcacccattaaatcgtcatttagcattaggtatatttcctaatacaatccctccctcctcccccaccccacaacagtccatgttttgtgatgttcccctttctgtgtccatgtgttctcattgttcaattcccacctatgagcgaggacatgtggtgtttcgttttctgtccttgcgatagtttgctgagaatgatggtttccggcttcaaccttgtccctacaaaggacatgtactcattattttttatggctgtatagtcttccacggtgcatatgtgccacattttcttaatccagtctatcattgttggatatttgggttggttccaagtctttgctattgtggatagtgctgcaataaacatgtgtgtgcatgtgtctttttagcagcatgatttataatcttttgggtatatacccagtaatgggatggctgggtcaaatggtatttctagttccagatccctgaggaatggccacactgacttccacaatggttgaactagttaatagtcccaccaacagtgtaaaagtgttcttatttctccacatcctctccagcacctgttgtttcctgatttttaataattcccattctaattggagtgagatggtatctcattgtggttttgatttgcatttctctaatggccagtgatgatgagcatcttttcatgtgtcttttggagattgcaaaaattttctcccattctgtgggttgcctattcactctgatggtagtttcttttgctgtggagaagctctttagtttaattagatcccatttgtcaattttggcttttgttgccactgcttttggtgttttagacatgaagtccttgcccatgcctatgtgctgaatggtattgcctaggttttcttctaggatttttatggttttaggtctaacatttaagtctttaatccatcttgaattaatttttgtataaggtgtaaggaaggaattcagtttcagctttctccatatggctagccagttttcccagcaccatttattaaataaggaatcctttccccatttcttttttttgtcaggtttgtcaaagaccacatagttgtaggtatgtggcattatttctgagggctctgttctgttccattggtcaatatctctgttttggtaccagtaccatgctgttttggttactgtagccttgcagtatagtttgaagtcaggtagggtgatgcctccagctttgtacttttggcttagcattgacttggcaatgcaggctctttcttgggtccatatgaactttaaagtagtttttttccaattttgtgaaaaaagtcattggtagcttgatgggaatggcattgaatctataaattaccttgggcagtatggcgattttcatgatattgattcttcctacccatgaatatagaatattcttctatttgtttgtatcctgttttatttcattgagcagtggtttgtaattctccttgaagaggtccttcccatcccttgtaagttggattcctaggtattttattctctttgaagcaattgtgaatgggatttcacgcatgatgtggctctctgtttgtctgttattggagtataagaatgcttgtgatttttggacattaattttgtatccaggaattgaactcagctctgcaccaagtggacctaatagacatctacagaactctccacccccaaatcaacagaatatacactcttttcagcaccacaccacacctattccaaaattgaccacatagttggaagtaaagcactcctcagtaaatgtaaaagaacagaaattataacaaactctctctaagaccacagtgcaatcaaactagaactcaggattaagaaactcactcaaaaccgctcaacttcatggaaaatgaacaacctgttcctgaatgactactggctacaaaacaaaatgaaggtagaaataaagatgttctttgaaactaatgagaacaaagacacaacataccagaatcactggtacatatttaaagcactatgtagagggaaatttatagcactaaatgcccacaagagaaagcaggaaagatctaaaattgacatcctaacatcacaattaaaagaactggagaagcaagagcaaacacattcaaaagttagcagaaggcaagaatcaactaagatcagagcagaactgaaggaaatagagacacaaaagacccttcaaaaaatcaatgaatccaggagctgttttttttaagagatcaacaaaattgatagaccactaacaagactaataaagaagagaggagaatcaaatatattcaataaaaaatgataaaggggatatcaccaccaatcccacagaaagacaaactaccatcagagaatactataaacacctctaggaaaataaactagaaaatctagaagaaatggataaattcctcaacacatacactctcccaagactaaaccaggaagaagttgaatctctgaatagatcaataacagactctgaaattgaggcaataattaatagcttaccaaccaaaaaaagtccaggaccagatggattcacagccaaattctaccagaggtacaaggaggagctggtaccattccttctgaaatgattccaatcaatagaaaaagagggcatccggcctaactcattttatgaggccagcatcatcctgatgccaaagccgggcagagacacaaccaaaaaagagaattttagaccaatatccctgatgaacattgatataaaaatcctcaataaatactggcaaagcgaatccagcaacacatcaaaaagcttatccaccatgatcaagtgggcttcatccctgggatgcaaggctctttcaatatatgcaaatcaataaacataatccagcatataaacagaatgaacgacaaaaaccacatgattatctcaacagatgccgaaaagacctttgacaaaattcaacaactctgcatgctaaaaactctcaataaattagatattgttgggacgtatctcaaaataataagagctatcaatgacaaacccacagccagtatcatactgaatggggaaaaactggaagcattccctttgaaaactggcacaagacaaggatgccctctctcaccactcctattcaacatagtgttggaagtgttggccagggcaattaggcaggagaaggaaataaagggtattcaattaggaaaacaggaagtcaaatggtccctgtttgcagatgacatgactgtatatctagaaaaccccattgtctcagcccaaaatctccttaatctgataagcaatttcaggaaagtctcaggatacaaaatcaatgtacaaaaatcacaagcattcttatacacccataacagacaaacagagagccaaatcatgagtgaactcccattcacaattgcttcaaagagaatgtgtttgctttgcttttctagttcttttaattgtgatgttagggtgtcaattttggatctttcctgctttctcttgtgggcatttagtgctataaattttcctctacacactgctttgaatgcaacccagagattctggtatgttgtgtctttgttctcattagtttcaaagaacatctttatttctgccttcatttcgttatgtacccagtagtcattcaggggcaggttgttcagtttccatgtagttgggtggttttgagtgagtttcttaatcctgagtcctagtttgattgcactgtggtctgagagataatttgttataatttctgttgttttacatttgctgaggatagctttacttccaactatgtggtcaattttggaataggtgtggtgtggtgttgaaaaaaatgtacattctgttgatttggggtggagagttctgtagatgtctattaggtcctcttggtgcagagctgagttcaattcctgggtatccttgttgactttctgcctctttgatctgtctaatgttgacagtggggtgttaaaatatcccattattattgtgttgaattataagtctctttgtaggtctctaaggacttgctttatgaatctgagtgctcctgtatagggtgcaagtagttagctcttcttgatgaattgatccctttaccattatgtaatggccttctttgtctcttttgagctttgttggcttaaagtctattttatcacagactaggattgcaacccctccctttttttttgttttccattttcttggtagatcttcctccatccctttattttgagcatatgtgtgtctctgcatgtgagatgggtttcctgaatacagcacactgatgggtcttgactcttaatccaatttgccagtctgtgtcttttaaatagagcatttagcccatttacatttaaggttaatattgttatgtgtgaatttgatcctgtcattatgatgttagctggttattttgcttattagttaacgcagtttcttccttgcctcgatggtctttataatttggtgtgtttttgcagtgactggtaccagttgttcctttccatgtttagcgcttccttcaggagctcttttagggcaggcctggtggtgacaaaatctctcagcatttgcttgtctgtaaagtattttatttccccttcacttatgaagcttactttggctggatatgaaattctgggttgaaaattcttttctttaagaatgttgaatattggcccccactctcttctggtttgtacagtttctgttgagagatgatctgttagtctgatcggcttccctttgtgggtaacccgacctttctctctggctggccttaacattttttccttcatttcaactttggtgaatctgtcaattaagtgtattggagttgctcttctggaggagtatctctgtggtgttctctgtatttactgaatttgaatgttggcctgcctggccaaattggggaaattttcctggataatatcctgcagagtgttttccaacttgattccattctccccatcactttcaggtacaccaatcagatgtagatgtgggcttttcacatagtcccatatttcttggaggctttgttcatttctttttttttttttcctctaaacttctcttctcgcttcatttcattcatttgatcttccatcactgataccctttcttccagttgattgaatcggctactgaggcttgtgcatttgtcacttagttctcgtgccatggttttcagctccatcaggtactttaaagacttctctgcattggttattctagttatacatttgtctaatcttttttcaaggtttttaacttctttgctatgggttcaaacttcctcctttagctaagagtagtttaatcatctgaagtcttcttctctcaactcatcaaagtcattctctgtccagctttgttccattgctggtgaggagctgcgttcctttggagaaggagaggcactctgatttttaatattttcagtttttctgctctgtttttccccatctttgtggttttacctacttttggtctttgatgatggtgatgtactgatggggttttgttgtgaatgtcctttctctttgttagttttccttgtaacagtcaggacccccagctgcaggtctgtgtgagtttgctggaggtgcactccagacctcgttgcctgggaatcagcagcagaagctgcagaacagaggatattggtgaacagcaaatgttgctgcctgatcattcctctggaagtttttttacagaggagtatccggctgtgtgtggtgtcagtctccccctactgggggatgcctcccagttaggctacttggggttcagggacccacttgagtaggcagtctgtccattctcagatatcaagctgtgtgctgagagaacaactactctcttcaaagctgtcaaacagtgatatttaagtctgcagaggtttctgctgcattttgtttggctatgccctgcccccagaggtggagtctacagaggcaggcagacctccttgagttgtggtgggctcctcccagttcaagcttcctagccactttgtttacctacttaagcctcagcaaagccccctcccccagcctcgttgctgccttgcagtatgatctcagactgctgtgctagcaatgagtgaggctccatgggcatgggaccctctgagccaggcatgggatataatctccttgtgtgctatttggtaagaccatcggaaaagcacagtattagggtgggagtgacccgattttccaggtgccctctgtcacctctttccttggctaggaaagggaattccctgaccccttgcacttcctgggtgaggtgatgccttgccctgctttggttcactctcagtgcactgcacaaattgtcctgcaaccactgtctgatactcccccatgagatgaacctggtacctcagttggaaatgcagaaatcattcattttagaaaaaggctttctgcagatgctttgtgatgtgtacattcatctcacagagttaaaccactgttttgattgagccatttggaaacactttctgtacaatctaacaagggatacttgggagcacattgaggcctatggtgaaaaaggaaatatcttgagataaaaagtagaaagaggctttctaagaaactgctttgtgatgtgtgcattcttctcaaagagttaaatcttccttttgattaagcaatctggaaccactgttttaatagaatctacaaaaggaatatatgggagtcaattgaggctgattgtgtaaaaggaaatgtattcagataaaaactagaaaggagcattctgagaaactgatttgtgattagtgcattcatctaactgagttaaaactgtcttttgattgagtaatttggaaatactgttttggtagaatctgtgaagggatacgtgggagcacattgtgacctattgtagaaaaggaaataacttcagataaaaattagaaagaatctttctgaggaaatgctttgtgatgagtgcattcatctcacagagttaaacaattcttttgattgagcagtttggaaacactgtttttgtagaatctgagaagggatatttgggagcgctttgaggcctatgatgaaaaactaaatatcttcagatagaaactgaaaacaagctttctgggaaactgctttttgatgtacacattcatctcacagaattaaacctttctttggatggagcagcttggaaacactgttttggtagaatctgcaatgggatattttaaagcacatcgaggactatggtgaaaaaggaaataagttgagagaaaagccagaaagaagcttgctgaggaactttattgtgatgtgtgcattcatctcacagagttaaacctttccttttattgagaagtttggaaaaattgtattggtaaaatctgtgaaaggatatttgggagtgctctgagtcatatggtgaaaaaggaaatatcttcagataaaaactagaaagaagctttctgagaaactacttggtgatatgtacattcatctcagagttaagcctttcttttgtttgagcagtttggaaaaccacatttggtagaatctgtgaaagtgtatttaggagcactttaaggtttatggttaaaatagaattatcttcagataaaaacaagaaacatgatttctcagaaaccactctttgatgtgagcattcatctcacagaattaaacctttctgttgattgtgcagttttgaaacactgttttgtcagtatctgtgaagggatatttgggagcacattgaggatgatgatgaaaaaggaaatagcttcagataaaaactagtaagaagctttctgagaaactgctttttgatgagtgcattcgtctcacagtgttaaaccttttttttattaagccatatggaaacacagtttttgtaggatcttagaaaggatatttgggagcactttgaagcctatggtgaaaaaggaaatatatttagagaaaaactagaaagaaacttcctgggtaactgccttgtgttgtgtgcattcatccaacagagttaaacctttcttttgattgagcagtttggaaacactgttttggtagtatctgtgcagaaatatttgggagcacatagaggcctatggtgaaaaagtaaatacctttagataaaaactagaaaggagctttctctggaaactgctttgtgatatgagcatccttgtcgcagagttaaacctttcttttgattgaggagtctgtaaacactgtttagtagaatctacagagggatataagggagcgtattgagacctatgttgaaacacgacatatactgagataaaaaatagaaagaagttttctgagaaactgctttgagatgagtgcattcatctcacagaggtgacctttcttttgattgagtagttttgcaacactgtttttgtggaatctaagtagggttatttgggagttctttaaggcctagaatgaaaaattaaatatcttcagataaaaactagaatgaagctttctaaaaactgctttgtgatgagtgcattcatctcacagaattaaacctttctttaatttgagcagtttggataaactgtttttgtagaatctacaaatgaatatttgggagtgctttgaggcatatggtgataaaggaaatctcctcagataaaaagtagaaggaaggcttctggataactgccttgtgatgtgtgcattcatctcaaagatttaaatgtttcttttgattgagcagtttggaaacactgtttttgtagaatgtgtgaagggatatttgggatggcattgaggcctatggtgaaaaaggaaatatcttcagataaaaactagaaagaaattttctgggaaactgcttagtgatgtgtttattctcctaacagagttacacctttcctttgattgagcagtttggaaacattgtttttgtagaatctatgaagggaaacctggaagcgcattgtgtcctacgatgtaaaaggaaatatcttgagataaaaactagaaagaagctttctgagaaactgctttgtgatgtgtgcattcatctcacagagttaaacctttcttttgtttgagtggcttggaaaaactcatgtggtagcatctgccaagggatatttaggagcacattgagggctatggttaaaaacgaaatatcttctgataaaaactagtaagaagatttctcagaaaaagttttgagatgtgatcattcatctaacagaattaaacctttcttttgattgtgtagttcagaaacactgttttgggagtatctgggaagctatatttgggagcgcttagaggcctatggtcagtaagaaaatatcttcagataacaactagaaagatggtttctgagaaacttctgtgatgtgtgcattcttccaacagagataaacctttctttagattgagcagtttggaaacactgtttttgtagaatctatgaagggatatatggatgtgaaattgaggcctattatgaaaaaggaaatatcttctgagaaaaactagaaagaagctttctgaataactgctttgtggtgtgtgcattcatctcacagaattaaacctttcttttgattgagcagtctggaaagactgtttttgtagaacaaacgtgggatttatgagactgcattgaggactagggtgaaacaggaagtatcgtcagagtaaaactagaaagaagcattctgagaaactgctttgtgatatgtgcatgcatatcccagagttaaacttttcctttaatcgaagagtttggaaacactgtttttgtagaatctgcaaagggatatttgggagcactttgtgggttatggtgaaaaatgaaatatcttcagagaaaaactcaaaagaagttctctcagaaactgctttgtgaagtgtggtttcttctcacagagttacacctttcttccaattgagcagtttggaaacactgttttggtagaatctgtaaagggatatttgggagtgcattgaggcttatggtgacaaaggaaatattttcagataaaaactagaaagaaggttcttcagaatctgctttttgatgtgctcattcttctcacagaggtaaacctttcttttgattgagcagtctggaaacactgttcttgtagaatctgcaaagtgatatacgggaaagcattgaggcctactgagaaaaaggaaataccttcagagaaaaactagaaggaagatttctgaaaaactgctatctgatgtgtgcattcttgttacagagttaaacctttctgtttattgtgcagtttggcaacacagtttttgtggaatctgagaaggaatatttgggagcactttgaggcctatagtgaaaacgggaaggtcttcagataaaaagtagaaataagatttctgggaaactgctttgtgaagagtgcattcatcacacagatttaaaactttcttttgattgagcagtttggaaacacttttttgcagaatctgggaaaggatatttgggagtgctttgaggcatatggtgaaaaacaaaatatcttcagataaaaactggaaacagtctttctgggaaaccactttttggtgtgtgcattcatctcacagagttaaacctctcttttgattgaccagtttagaaacactgtttttgtataatctgagaagggatatttggaaccacttggtgacctatggtgaaaaacaaaatatcctcagataaaaactggaagcaagcttcccaggaaactactctgcaatgtttgcattcatctcacggaggtaaaccattcttttgattgagcagttttgaaaaatgtttttggtagaatctgcaaagggatattaaggaatgcattgaagcctatggtgaaaaaggaaatatcttcagagaaaatctagaaagaagctttctgagaaactgctttgtgaagtgtgcattcttctcacagagttaaacctttcctttgattaagcagtttggaaacactgtattggtagtatctgtgaagggatatttgggagcactttggggcctatggtggaaaaggaaatatcttcagataaaaactagcaagaacctttctgagaaactgctttgtgatgtgtgcattcatctcacagatttaaacctttcctttctttgaggagtttagaaaaactcttttggtagaatctgcgaagggatatttaggagcacattgagggctatagttaaaaaagaaatatcttcagataaaatctaggaagacagtttctgagaaactgctttgtgttgtgtgtattcatctcacataattaaacctttcttttgattgtgcattttggaaccatggttatgggagtattgcaaaaaaagatatttggatcacattgaggatgatggtgaaaaaggatatatcttcagataagaactagaaagcagctttgtcagaaaccacattggatgtgtgcattcttctcacagaattaaatgtttcttttgattgtgccctttcaaaagtctgttttggtagcatctgcaaaggaatatttgggagtgctttgaggcctatggtgaaagacaaaatatcttcagataaaaactagaaaacagattcctgataaactgcttggtgatgagtgaattcacctcacagaattaaacttttcttttgattaagcaggttggaaacactgttttggtagaatttgcaaagggatatttgggagtgcattggggcctatggtgaaaaagttaatatcttcacatagatactataaagaagctttctctgaaactgctttgtgatgtgtaccttcttctcaaagagttaaacttttcttttgattcaggctttggaatcactgtttttgtagaaactgtgaaaggatatttgggagtacatgaggcctatggtgaaataagttatagcttcagataaaaactacaaagaagctttctcagaaacagctttgtgttatgcacattcttctcacagagttaaacctttttttggattgaatagtttggaaacacagattttgtagaatctgcaaatttatatttgggagcacattgaggcttatggtgaaaaagaaaatatctgcagataaatactagaaagaacctttttcagaaaccagaaactgctttgtgacgtgtgcatttttctcacacatttaagcctttttttttgattgagcaatttggaaagactgtttttgtagaatctgtgaagggatattttggaacacattgaggcctacggttaaaaaggaaataatttcagagaaaaaatagaaaaacctttctgagaacctgctttgtgatgtgggaattcttctcacagagctaaacccttcttttgattcagcagtttgtaaacagttttggtagaatctgggaagggatatttgggagcgtattgaggccaatggtaaaaatggaaatatcttcagataaaaactagaaagaagctttcttagaatccactttgggatgagtgcattcatctcacagagttaaaactttcttttgattgagcagtttgtcacactgtttttgtggaatcttgaaagggatatttggctgtggtttgaggcctatggtgaaaaatgaattactttcagataaaaactagaaagaggcattctgggtaactgccctgtggtgtgtgtattcatctcacagagttaaacctttcctttgattgagcagtttcacaacagtttttttgtagaacctgagatgggatatttaggagaactatgaggcctatggtgaaaaatgaaatatcttcagataaaacaagaaagaagctttctgggaaactactttgtgacgtgtgcattcatctcacagagttcaacctttcttttgattgagcagtttggaacactgttttgatagaatcaggaaagggaaatttgggagtgcattcaggcctagggtgaaaaaggaaatatattcagataacaactagaaagaagctttctcagaggccattttgtgatcttttcattcttctcacagagttaaaccttttcttggttgattgctctggaaaaactctattggtagaatttttgaagggatatttttgagtgcattgaggcctatggtgaaaaaggaaatatcttcagataaaaaatagaaagaagctttctgggaaactgctttgtgatgttctcattcttctcacagagttaaacctttcttttgattgagcaggctggaaacactgtttttgtaaaatctgcaaagagatatttgggagcacattgaggcctatcatgaaaaaggaaatatctttagataaaaacttcaaagaagctttctcataaaccacactgtcatgtgttcattcttctcacagagttaaacctttcttttgattgagccatctggaaaaactgttttggtaaaatctgcaaagggatatttggaagtgcattgaggcctatggtgaaaaaggaaatatcttcagataaaatgtagaaagaagatttcacagaaactgctttgttatgtgtgtattcttttaacagagataaacatttcctttgattgaggagtttggcagcacactttctgtggaatctgagaagggatattttggagctatttaaggcctagggtgaaaaaggaaatatcttcagataaaaagtagaaagaagctttctgcgaaactgcttcatgatatttgtattcatctcacagagttaaacttttcttttgattgagcagtttggcaacagtgtttttgtagaatctgagaagagataattgacagtggtgtgaggcctatggagaaaaaagaaatatctacatataaaactagaaagaagctttctaggaaactgctttgtgatgtatgcattcgtgcacagtgttaaatctttcttttgcttgagaagttttgtaacactgtttttgtagtatctacaaaggaatattttggagcacattgctgcttaagttgaaaaacgaaatatctacagattaatactagaaagaaggtttctcacaaactgctttgtgaagtgtgcattcttctcacagagttaaacctttcttttgatcaaacaaattggaaacactgtttttgtagaacctgtgaagggatattttggagcacttataggcctacgctgaaaatggaaatatcttcagataaacactagaaagacgttttctcagaactactttggatgtgtgcattcttctcatagatttaagcctttcttttgattgagcagtttggaaacactgtttttgtaggatctatgcagggatatttgggagagcattgaggcctatggtgaaaaactaaatatcttcagataaaaaagaaaaacaagctttctgggaaacggctttgtgatgtgtgcattcacctcacagaattaaacttttttttgattgaacagtttgaatatactgtttttgtagaatctgtgaaggtatatctgggagcagttggaggcctactgtgaaaaaggaaatgtcttcagacaaaaagtagaaggaagatttgccaaaaactgctttgtgatgtgtgcattcttctcacagtgttaaatcattcttttgtttgagcagtttgggaaactgttttggtagaatctgtgaagggatatttgggagcaccttgtggcctgtggtgaaaaaggaaatatcttcagagaaaaactagaaagaagctttcagagaaactgttttgtgttgggtgcattcatctcacagagttaaacttttcttttcattgagcagtttggaaacactgtttttttagaatcttcaaagggatatttgggagccattagaggcctatgttgaaaaacaaaacatatttgagaaaaacctgaaagaagctttctgagaaactgcgttgagatgggtgaattcgcctcacagatttaaacttaaattttgattgagcagtttggaaaccctgttttggtagaatctgtgaatggatttctcagagcacttttaggcctatgataaaaaaggaaactttttttatcagggtttttgtgaaatctgagaagggatatttggaaacatttagaggcctatggtgaaaagtgaaatatcttcagagagaaacaagaaagaagctttctaagaaactgctgtgtggtgtgtgcattcatctgacacagttaagcctctcttttgattgagcagtttggaaattcagtttttgtagaatctttgaaaggatatatgggagagaatggaagtctatggtgaaaaaggcaatgccttcagagaaaatctagaaagaagctatctgagaaactgctttgtgaggagtgcattcatctcacagatttaaacctttcttttgattgagcagttttgaaacactgtttttgtagagtctgcaaaaggatatttgggaatgctttgaggcctatggtgaaacaggaaatatcatcagataaaaactagaaagaaggtttctgagaaactgctttgtgatgagtacattcatctcacagagttaaacctctctttggattaagcagttggaaagagtgtttttgtggaatctgagaagggatatttgggaacatttaggggcctatggtgaaaaattaagtatcttgagataaaaaccagaaagaaactttctaagaaacttctttgtgatgtgtgcattcatctcacagaattaaacctctattttgattgagcagtttagaaacactgtttttgtagaatctgtgaaaggatatatgggagtgcattaaagcctatggtgaaaaaggaaatatcttcagagaaaatctacagagaagctttctgagaaactgctttgtgatgtgtgcattcttctcacaatgtcaaacctttcttttgattgagcagtctggaaacattgtttttgtagaatctatgaaggggtatatgggagtgcaccgaggcctatggtgaaaatggaaatatctttgagaaaaactagaaacaggctttctgagaaattgctttgtgatatgtgcattgatctcactgaggtaaacctatcttttgattgagcagtttggaaacactgttttggtagaatctgcaaaaggatatttcagagtgctttcatacctatggtaaaataggaaatatcttcagataaaacctagaaagaagctctctgagaaactgctttgggatgagcacattcatctcacgtagtgaaacctttctttttatttagcagttttgcaacagtgtttttgtagtatctgagaagggctattttggagtgcattgaggcctatggtgaaaaacaaaatatcttcagataaaaacaagaaagaagcgttctgggaaactgctttgtgatgtgtgcattcatctcactgagtaaaacttttcttttggttgagcagtttggaaacactgttttggtaaaatctgcaaagagatatttgggagcccattgtggcctacgctgaaaaatgaaatatcttaagagaaaaactagaaagaagctttctgagacactgttttgtgatgagtccattcatttcagagagttaaacctttcctttgattgagcattttggaaacactcttttcatagaatctgcaaagggatatatgggactacattgagacctatggtgaaaaaggaaatatcttcagatgaatagttgaaagaagtttttcagagtctcctttttgttgtgtgcattcttctcacaaagttaaacctttcttttgattaagcagtttgggaacactgtttagtataatctgcaaaagcatatataggagcacattaaggtgtattgtgaaaaagaaaatctcttcagggaaaaactggaaagaagctttgtgagaaactgtttattgatgtgtgaattcatctcacagagttaacctttcctttgaatgagcagcttggaaacactgttatggtggaatctgcgaaggtatatatgggagcacattgaggcctttgatgaaaaagaaatatctacagagaaaaactagaaagaagttttctaagaaattgcttgtgatgtgtgcattcatctcacagagttaaacctttcttttgattgcagtttggaaacactgttttggaagtatctgcgaagggatgttttggagtgcattgaggcctatggtgaaaaaggaaatatcttcacataaaagctagaaagaagcatcctcagaaaccactttgtgatgtgtgcattcttctcacagagttaaatcttcgttttcatggagagtttggaaacactgttttggtagcatctgtgaagggatatttgggagccctttgaggtctattttgaaaaaggaaatatcttcagataaaaactggaaagaagctctctgagaaactgctttgtgatgaatgcatttgactcgcagagataaacctttcttttgattgagcagtttggtaacactgtttttgtagactcctcgaaggcatatatttgagctcattaaagcttattttaaaggaggaaatatcttcagggaaaaactataaagaagcttcctcagaaactgttttgtgatacgctcattcttctcacagagttaaaactttctttttattaagcaatctggaaacaatgtttttttagaatctgcgaagggatatttgggagctccttgaggcttttggagttaaaggaaatatcttcagagaaaaactaaaaagaagctttctgagaaagtgctttgtgatgagagcactcatctcacagagttaaaacgttcttttgattgagcagtgtggaaacactgtttttgtagaatctgtgatggaatatttgggagtgcaatgaggcctatgctgaaaaaggaaacatcttcagataaaaacctgaaagaaactttttcagaaactgttttgtgatacatgcattcttctcaaagaattaaacctttctttttattgagcagtttggaaacactgtttttgtagaatatgccaagggatattcgggaacatattgatgcctattgtgagaaaggaaatatcctcagataaaaacaagaaagattgtttatgagaaactgctttgtgacatgtgcattcttctcacagagttaaacctttctttagattgagcagtcaggaagcactgtttttgtaaaatctacgaagggatatatgggtgcacattgaggtctatggtgaaaaaggaaattccatcagagaaaaactagaatgaagctttttgagaagctgctttgtgatgtgtgcaatcatctcacagagttaaagttttagtttgattgaccagtttggaaacactgattttgtagaatctgtaaaaggatatttgggagcacattaaggcctatggtgaaaaaggaattatcttcagatgaaaactagaaagatgctttcttgagaaactgatttgtgttgtatgcattcatctcacagagttacatctttattttgcttgagcagtttggaaatactgttttgttagaatctgcaaagggatatttgggagcttcttgaggcctatggtcaaaaaggacataacttcagatagaaactagaaagaagaatttgacgcactgctttgtgttgtgtgcattcatctcacatagttaatgctttcttttgattgagcagcttggggagactgtttttgtagaatctgtgatgggatatttggaagtgcattgaaatctatggtgaaaaaggaaatatcctcagaaaaaaagtagaaatatttctgagtaacagttttgtgagttgtgcactcatctcacagagttacacctttcttttgattgagcagtttggaaacactatttttgtagaatatgcaaagggatatttgagaatgtaataagacctatggtgaaaaaggaaatatcttcacataaaaattaggaagatttctgagaaacagccttgtgatgtctgctttcatctcacagtgttaatcccttcttttgattgaggagcttggaaagacttttttgtaggatctgcaaaatgatatttgggagcacgtagaggcctatggtgaaaaagataatatcttgtgatgaaaactagtaagaagctttctgagacactgctttgtgatgtgtgcattcatctcaaagatttaaacctttcttttgattcagaagtttggcagcactgtttgtgtagaatgtgaaagagatatttgggagtgtattgaggcctatggtgaaaaagtaaatatcttcacaaaaaaagagaaagacccttgctgaggaactgctttgtgatgtgtgcattcatctcacgcagttaaatctttcttttgattgagcagtttggaaaactgtttttatagactctgtctagggacatatgggagtactttgaggcttagagtggaaaaggaaatatcttcacataaaaactagaaggaagctttctcagaaactgctttgtgatgtgtgcattcatctcacagagttaaagttttcttttgattgaccagtttggaaacactgattgtgtagaatctgcaaaaagatatttgggagtgccttgagggctatggtggaaaacaaaatatcttcagataaaaactagaaagttgctttctgagaaactgctttgtgatgtttgcattcatctcacagagttaaacctttctttggattgagcagtttgcaaagactgcttttgtagaatctgcaaagttgtatttggcagcacattgaggcccacagtgaaaaaggaaatatcttcagataaaactagaaagaagctttgtgaaaaactgctttgttacggatgcattcatctcatagagttaaacctttctactgattgagcagtttggaaacactattttggtagattctgcgaagggatatttgggaatgcactgaggcctattgtgaaagaggaaatatcctcagataaatctggaaagttttcagataaatactagaaagtatcttttggaggaactgctttgtgatatgtgcattcatctcacagagttaagctttattttgatttaccagtttggaaaaactgattttgtagaatctgtgaagggatatttggtagcatattgaggcctacagagaaaaaggaaatatcttcagataaatctagaaagaatctttgtgagaaactgctctgtgatgggtgcattcatctcacagggttaaacctgtcttctgtttgagccgtttggaaacagtatttttgtagaaactgcaaaggaatatttgggcccactttgaggcctatgatgaaacaggaaattccttcagataaaaaccagaaagaagctttctgagaaactgctttatgatgtatacattcatctcacgaattaaagctttcttttgattgagctatttggaatcagcatttttgtagaatctgcgaagggacattttggaatgcaatgaggcctatgttgaaaaaggaaatatcttcacataaaaactagaaagaagtttctgattaactgctttgtgatgtgtgcattcatctcacccagataaagctttcttttgattgagcatcctagaagcactggttttgttgaatctacaaagggataatttggagcacattgaggcctatggtgaaaaaggaaatttcttcagataaaaacaagaaagaatgtttctgagaaactgatttgtgatgtgtgcattcatctcacagagttaaacttttctcttgattgagattttggaaacactgtttttatagaatctgtcatgtgatatatgggagtgcactgaggcctatggtgaaaaaggaaatttcctcagataagaagtagaaagaagctttctgattaacagctttgtgatgtgtctattcatctcacagaattaaaactttctattgattgagcatcttagaaacactgtttttgtagaatatttgaagggatatatgggagcatgttgaagcctatggtgaaaaagaaaatatcttcacataaaaactagaaagaaactttctgagaaactgctttgtgatgtgtgaattcatctcaaagagttacacctttcttttgattgagcagtttgtaaaaactatttttgtagaatctgctagggatatttgggaacatattgaggcatatggcgacaaaggaaataacctcagataaaaagtagaaagacttctgagaaacagctttgtgatgtatgcattcatcccacagagttaaattattcttctgattgagcactttgaaaacactgtttttgtaaaatctgtcaagggatgtaagggagcacatagaggcctatggtgaaaaaggaaatttccacagataaaaattagcaggaagctttctgattaacatctttgtgatgtgtctattcatctcacagagttaaacttttctattgattgagcatcttggaaaaactgttttcatagaatctgtctagggacatatgagagggtatcgaagcccatggtgagaaggggaatatcttctcataaaaactagaaagaaactttctcagaaactgctttgtgatgcattcattcatctcacagtgttaaacctttgctttgattgagcagtttggaaacactgttttttttagaatctgaaaaaggatatttgggagtgccttgaggcctgtggtggaaaaggaaatatcttcagataaaaattagaaagaagctttttgggaaacttctttgtgatgtgtgcattcatctgacagagttaatccttccttatgattgagcagtttggaaagtagaatctgcaaaggtatatttggtagcatattgaggcctactgtgaaaaaggaaatatcttcagataaatctagatagaagctttgtgaataactgctttgtgatgagtgcattcatctcacagagttaagcctttcttctgattgagtagtttggaaacactatttttgtatattctgtgaagggatatttgggaacgcatttaggcttatggtgaaaaaggaaataacctccaataaaaactagaaatatttctgagaaacagctttgtgctgtgtgtctttatctcacagagttaatcctttcttttgattgagcagtttggaaagtgtttttctagaacctgcaatgggatactttagaatgctttggtgcctatggtgaaaaaggaaatatcttcagataaaaactagaaagaagctttctgagaaacagctttgtggtgtgtgcattcatctcacagagttaaaactttcttatgattcaggagtttggaaacactgtttttgcataatccttgaagggatgttaaggaatgcattgaggccatgttgtaaaaggaaatatcttcagataaatactagaaagaagctttcagtgaaactgctttgtgatgtgtgcattcatctcacagtgttcaagttttgttttgattgaccagttttgaagcactgattttgtagaatctatggagggatatttgggactgcagtgaggcctatggtgaaagaggaaataacttcagatgaaaactagaaagaatctttctgtgaaactgctttgtgatgtgtgcattcatatcacagattaaaacctttcttttgattgagcagtttggaaaccctgtttttgtagaatctgtgatgggatattagggagtgccttgaagtgtatgttagaaaaggaaatatcttcagataaaaactagaaagaagtttttcagacactgctatgtgatgtgtgcattcatctcacagagttaatactttcttttgattcagcaattcggaaagactgtttttgtagaatctgtgaaggcatatttgggagtgcattgagtcctacagagaaaaagaaatttctacagagaaaaagaaaatatctttagataaatctagaaagaactttttgagaaactgctttgtgatgggtgcattcatctcacagagttaaacctttcttctgattgagcagtttgaaaacactgcttttgtagaaactgtgaaagaatatttgggatgctttgaggcctatggtgaaagaggaaatgcctttagataaaaactagaaagaagctttctagttttctgatgtgtgcatcatctcacacactgatgtgtgcattcatctcactgagttaaagttctctagttttctgatgtgtgcattcatctcaccaagttaaagttttctttttattgagctgtttggaaaccccatttttgcagaatctgtgaagtgatatttgggaacgcaatgaggccaatgtcgaaaaagtaaatatcttcacataaaaactagaaagaatctttctgactaactcctttgtcatgtgtgaattcgtatcatacagataaagcttccttttgattgagcatcttggaaacactttgttgaatctgcacagggaaatttttgagcacattgaggcctatggtgaaaaagtatatatgttcagaaaaaaactagaaagaagctttctgagaaactgctttgtgatgtgtgcatttatctcacagagttaatcctttcttttaattgggcagtttggaaacactgtttttatagaatctgtcaagggatatatgagagtgcattgaggcctatggagaaaaaggaaatttcctcagataaaaactagcaagaagctttccaattaacagatttgtgatgtgtccattcatctcacagaatgcaacctttctattgattgagcatcttggaaaatctgtttttgtagaatctgtgaagggatatatgggagcatattgaagcctatggtgtaaaaggaaatatcttcatataaaaactagaaagacactttctgagaaactgctttgagatgtctgcattcgtctcccagagtttaagcattcgtttttgtagaatctgtgaagggatatttgggagcgcataggagcctatggtgggaagggaaatatcctgagataaaacccagaaaggtgttttgaaagaactgctttgtaatgtgtgcattcatctcccagagttaaattttgttttgattgactggttttggaacactattttgtagaatctgtgaagggatatttgggagtgcattgaggcctatggtgaaaaaggaaatatcttcagagaattctagaaagaagctttgtgagaaactgctttgtgatgggtgcattcatatcacagagttaatcctttctcctgattgaagcatttggaaacactgtttttgtagaatctgcaaagctagatttgggaatgcattgaggcctatggtgaaaaaggaaatatcctcagataaaaactagaaagatttctgagtaacatcgttgtgatgtgtgcattcctctaacagagttaaaccttcctttttattgagcagtttggaaacactgtttttgtagaatctgtgaagggatatttcagagcacgttgaggcctacggtgataaaggaaatatctttagataaaatgtagaagaagttctctgagaaacttatttgtgatgtgtatattcatctcagagagctaaaccttttctttgattgagcagtttggaaacactgttcttgtagaatctgtgaaggcacatttgggagcgcaatgaggcctacggtgataaaggagatatcttcagataaatactggaaagaagctttctgagaagctgctttgtgatgtgtgctttcatctcatagaggtaaacctttcttttgatttagtagtttagaaacactgtttttgtagaatccacaaaggggtatttgggaacacattgaggcttacggtgacaaggaaatatcctaagatgaaaactagaaagatttctgagaaacagctttgtgatgtgtacattcatctcacagagttaaagctttcttttgatagagcagtttggaaaccctatttttgtagaatctgcaaagtgatatttggtagtgcattgaggcctatggtaaaaaaatgaaatatcctacagtataaactggaaacatactttttgacaatttactttctgatgtgtgcattcatctcacagagttttacttttctttgattttcagtttggaaacactgtttttgtagactctgccaagggatatccttgtagatataggagagcattgaggtccagtgtgaaaaaggaaatgtctccacatgaaaaccagaaagatgatttctgagaaattgctttgtgatgtgtgcattcatcaaacggagttaaaccttccttttgattgagcatattggaaaccctgtttttgtaatatctgtgaagggatatttgggagtgctttgaggcctataatgtaaaaggaaatgtcttcatatgaaaattagaaggaaggtttctgagaaactactttgtgatgtctgcattcatctcactgagttaaacctttctttttattaagcagtttggaaacactctttttttataatctgtgaagggatactttggagtgaattaaggcctacggagaaaattgaaatatcttcacctaaaaaatagacagaagctttctgagaaactgctttgtgatgtccgcattcctctcacagagtttaagctttctttttattgagtagtttccaaacacagtttttgaaacatctctgaaaggatatttggaagcactttagggaacatggtgaaaaaggaaatatcttcagattaaaagtagaaagaagctttctgagatactgctttgtgatgtgtgcgttcatctcacagagttaaatgtttcatttgattgaacagcttggaaaccctttttttctaaaatatgtgaagggatatttgggagcgaattgaagcctatggtgaaaaaggaaatatcctcagataaatacttgaaagcagctttctgagaaactgctttttgatgtgctcattcttctcacagagttaatactttcttttgatagggcagtttggagacactgtttttgtagaaactgagaaaggatatttcaaattgcattgtagcatatggtgaaaaagcaaatatcttcagaataaactagaaagaagcactgtgagacactgctgtgtgatatgtgcattcccaaaactataaacatctgcttctctgggatagggatattgatgatgataaacctccttgactgcacgtgtgtttatcaggcctctgcagggggaagtacatcatgtgcttttggctcattcttgcaccccaacctggcattgtctttacaaaatcctgcatgcaattttgtatttacaataatcaggagcatttcatattttattctgcagcaatagtttcagggggtcctcctacccatttggaagccaataaaggtgtaggtgagaaactgaatatccccagataaaaactagaaagaatctatctggaaagtgctttgtgttgcatggattcatctcacagagcgaaacatttcttttcatgtagcagttttgaagcactctttaggtagaatcagtgaagaaacatttggggccatggaagcctataatgaaaaactgaatatacccagataaaaactagaatgaagctgcctgtgaaacttcttagtgatgtgtgaattcatctcacagacttaagcctttcttttcatacagcaggtttgaaacactcataggatagaatctgcaaagggacatttggaaacccatggaggcctatgttgaataactaaataaccccagataaaaactagaaataagccatgagaaactgcactgtgatgtgtggattcacctcacacagttaaacatttcttttgatttaggatgttaaaaacactcttctctaggatttttgaaggaaagttttggagcccattgaggcctatggggaaaaaatgaatattcccagataaaaactataaagaagctatctgtgaaactgctttgagttgtgtggattcatctcacagagttaaagatttttttaactcagcaggttggaaacactcattttgcaatatctgcgaagggacaacatcaaggcctatggtgaaaaacccaatatatttagataaaaactagaaagaagctatctgtgaaactgctttgtgatgtgtggattcttctcacagagttaaaactttcttttgatgcagttggttggaaacacttttttgttagaatctgtgaaggaacatttgcaaacccattgaggactatggtggaaaactgaatatcccaacataaaaattagaaagaaactgttagtgaaactactttgtgatgggtggattcacctcatagatgttaaccttccttttgattcagcaggttggaagcactctttttgtagaacctgcaaagggacatttgggagtccattgaggtctacattgaaaaaccaaatattagcagataaaaactagtaagaggttatatgtgaaacttcattgtgatgtgtggattcatctcacaaagttaaacatttcttttgattcagcagcttggaaacactctttttgtagaatttgcaatgggaaatttgggagccttttgaggcttatggtaataaaaaacgaatataaccagataaaaactaaaaagaagctatctgtgaaactcatttgtgatgtgtggatttaattcacagagtcaaacccttgttttcattcaacaagttggaaaacactctttttgtagaagctgcgaagtgacatttgagagcccatagactcctatggtgaataaccaaatatcttgaggttaaaaactagaaagatgctatctgtgaaactactttgtgatatgtggattcatctcacaaagttaaacctttcttctgattcagcaggttgcaatcactttttttgtaaaatcagcaaagagacatttggaagccctttgaggcctacagtaataaaccaaatatttctagaaaaaaaacaagagagaagttatctgtaaaactgttttgtgatgtgtgtattcatctcacagagttacacctttcttttgatactgcagtattgaaacactcttttgctagaatctgcgaatggacattttggaactcttagatgcctatggtgaataaccaaatatatccagataaaaatttcaaagaagctatctgtgaaacttctttgtgatgtggagattcatctcaaagagccaaacctttcttttttattcagcaggttggatatattattttggtagaatccatgaagggacacttcggagctcatggagtcttatgctgaaaatcagaatatccccagataaaaactagaaaaacatctgtctttgaaaatgctttggattcatctcacaaagataaacctttcttttgattcagcaggcgggaaatgctcttcggatagaattaccaagggaaaattgggagcacatagaggcctgtggtgaaaaactgaatatccccagataaaaactagaaagaagctatctgtgaaagtgctttgttatgtgtggattcatctcacaaagttatacctttctttttgattcaagagtttgcaaatacttcctttgcagaatctgcaaagggacatttgagatcctattgaggtgtatggtgagaaacagaatatcaacagatacaaactagaaagaagtgatccgtaaaactgctttgtaagatgtgttttcatcttacagtgttaaacatacgttttgattccagaggttggaaagatgctttaggtacaatctgcaaagggacatttgagagcccattgatgatgatggtttaaaaccaaatattccaagataaaactagaaaaaactatctgtgaaactgcattgggatgcatgcattcatctcacagagttaaagttctcctttgatttaggaggctggatacactttttcggtataatctgtgtagggaattttgggagccgtctcacacctgtcaagaaaaaacaaatatccccagataaaaactagacagaaactatctataaaacttaattttgatgtgtggattcatctcattgatttaaacctttcttttgattctgcagattgaaaaactcttttggaagaatctgcgaagggacatttggaagcccatagaagctgattgtgaaaaaacaaatattccaagatgaaaactagtaagaagctatatttgaaactgtattgtgatgtgtagatttatctcacagagttaaacttttctttggattcagcaggttggaaacacttgtttggtagaatctgtaaacggatatttgggagcctatagaggcctatgttgaaaaaccaagtatccataaataaaaactagaaggaagctacctgtgaaactgctttgtgatgtgtgtatccatctcactgagttaaaactgtcttttattcagtaggttgtaaaccctcttttggtagaatctgcaaagggacctatcacagcctgttgaggcctatggtgaaaaaacggatatccccagataaaaactagaaagaagctatttctgaaactgcattgtgatttgtgcatttatctcacagagttaaatgtttttattgattcagcaggatgaaaacactctttttgtagaatctgcaaagggacatttgggagttcttttaggcttatggtgaaaaactgaatacctccagaaaaaaaactagaaacaagctatctgtgaaattgatttgtgatgtgtgcattcacctcacagattttaatctttcttttcattcagtgagctgaaaacactctttttttagaatctgcaaagggacacatgggaacccataaaggcctatggtgaaaaattgaatatccccagataaaaagtaggaacaagctgtctgtgatactgcattgtgatgtgtgatttatctcacataggtaaatatttcttttgattcagcagattgcaaacactgttttagtagaatctgtggaggtacatttgggaacctattcaggcctatggtgaaaaacagtatacattcagaaaaaaacctgaaagaacatatctgtgaaactgatttttgatgtgtggattcatctcacagagataaacatttctttagatacagcagtgttgaaatattctttaaatagaatctgtgaagagacatttgtaagaccatggaggcctaagttgaaaaacagaatatcaccagataaaaactacaaagaaactatctgggacatttctttgtgatgtgtggtttcccccacagagttaaaccttctttcgatttagcacgttataaacactcttttactaggatctgtgaagggaaatttgtgagcccattttagcctatgttgaaaaactgaatatcccaagataaaaagataaaaaccagaaagaagctattagtgaaattgttttggatgtgtggattcatctcacagacttaaatctttcttttgtttaagcaggttttaaacacttttggtagaatctgtggagggacatttgggagcctattaagtcctatagtgaaaaaccgaatatccccagattaaaactagaaagaagccatctgtaaaactgctttcttatgtgtggattcatctcacagagttaaaactttctgtcaattcagcaggtttgaaataatctttttgtagaagctgtgaaaggacatttgggagccctttgtgaataaccaaatgtccccagataaaaactaggaagaagttattggtgaaaccgctttgagatgtgtggattcatctcaaagttacatttttcttttcccagcaggtgcaaaacaatttttggtagaatctgcgaagggacatttcagagcccataaagtcctatgatgaaaaacaaattatccccagataaaaactagaatcaagctatctgtgaaataactttgtgacatgtagattcatctcagagttaaacttattttttgattcagcaggtgggaaaaactcttttggtaggatttgcagagggacattttggagcccattgagacctatgttgtaaaacaaaatatccctagatataaactagaaagaagatctcatgaaacagcattgtgatttgtggattcatctgacacagttaaaaatttcttttgattcagcagtttggaaacactgttttggtagatcctgtgaagggacattttggagccctttgaggaatatggtaaaaaacataatttccccagatatattaagaggaagctaactgtgaaagtgctctgggatgtgcgtattcacccaagacttagacctttcttttgattcaggatgttggaaacactcttttggtagaatctgcaaagacatatttgggaacccattgaggcttataatgaaaaaatgaacattcaaagacaaaaactacaaagaagctatatgtgaaactgctttttgatgtatggattcatctcacagaattaaacctttgttttgattcagcaggttggaaacactattttggcataaattgccaaggtacatatgggagccctttgaagcctacagtgaagtgctgaatatctccagataaaaattcgaatgaagctatctgtaaaagtagtttctgacgtgtggattctttgcacagagttaaaagtttctttgattcagcaggttgcaaacactcctttgctagaatctgtgaagggacattccgagcccactgtagcctatggagaaaaatggaatatcccaggataaaaactagaaagaagctatatgttaaactgctttgtgttgtgtggattcatctctcagagttaaaggtatcttttgattacgtagcttgcaaacattccttttgtagaatctgtgaagggacatttggtagcactttgaggggtgtagtaaaaacagagtatccccagataaaaactagaaagcagctatagttataactgctttgtgatgtgtggattcatctcagagagttaaacctttttttgattcagcaatttgcatacaattcttttgtaggatctgtgaaggaatattttggagtccattttggcctatggtgaaagatcaaatatccccagataaaaactgaaagaagttaactgtgagactgctttgtgatatggggattcatgtcacagagttaaacatttgttttgactgagcaggttggaaatattcttttggaaaactctgttgagttacgttagggagccctttacagcttatggtgaaaaaccaaatgttcccagataaaaagttgaaagaagctatctgtgaaactgctttgtgaaagagtatgaaaacactcttttggtagaatctgtgaaaagacatttgaaagccgattgaggtatatggtgtaaaactgaatatccccagataaaaactagaaaagagcaatctgtgaaactgctttgtgaagggttgatgcatctcacagagttataccatttctttgattgggcaggttgcaaatacttcttatgtagaatctgcaagggacattcaggagcccattgaggcctatggtgaaaaacaaatctccccagataaaaactcgaaagaaggtatctgtgaaactacattgcgatgtgtggattcacctcacagagctaaaccattcttttgtttcagcaggttggaaacactcgttttgtagaatctgcaaagggacatttgtgagcccattgagccttatgatgaaaaactgaatatacccagataaaaactggaaagaagctatctgtgaaactgctttatgatgtgtggatttaattcacagtgttaaacctttcttttgatgcagcagcttgcaaatactcttttttgtagaatctgataagggacacttaggagccctttgaggactgtagtgaaaaactgaatatcttcacataaaaactagaaagagctatctgtgaaactgcttttttgatgagtggattcatctcacagtgttaaacctttcctttgattcagcaggttgaaagaactcgttttgtggaatctgcaaaaagatacgttgaggtcccctgtggcatacagtggaaaacacagtattcccagataaaaactggaaagaatttctttgtgaactgctttgtgatgtgtaaattcatctcacagagttaaacgtttcttcaatttaacatgtaggaaacactcttttggtagaatctgtgaagggacatttgggagcccattgaagcctatggtgaaagacagaatatcaccaggtatctgtgaactgctttgtgaggtctgaattcatctcaaagagctaaaacattccttaatacagcatgttggacacactctttttgtagaacctgcaaagggacatttgtaagccctttgaggcctatggtgaaaaattgaatgtgcacaaataaaaactagaaatgagctgtttgtgaaattgctttgtgatctgtgaattcatctcactgagttaaacctttcttttgatacagcaggattgaaaccctctttagttagaatctgcgaagggacatttgaaaacccatagaggcctatgttgaaaaacaaaatatccccagataaaaactataaataagctatctgtgatcctgctttgctatgtgtggaatcatctcagagagttaatcctctcttttgattcagcaggttgcaaacattcctttactagtatctgagaaaggacatttgtgaggccaatgtagcctactctgaaaaattgaatatccaaaggtgaaaacaagaaagaagctatcagtgaatatgctttgtgatgtgtggattcttctcatagagttaaacttttcttttgattcaaaagtttggaaatattcttttggtaaatcagggaagggatatgtgggacgccattaaggcttatggtaaaaaaaatattcccagataaacactagaaagaagctatctgtgaaactgcttcctgatgtgtggattcatctgacagtgttaaacttttcttttgattcagcaagttggaaaccctcttttggtacaatctgtgaagggacattttgaagccctttgaggcctatggtaagacatcgaatatccccagataataactacaaagaagctatctctgaaaattatttctgatgtcaggattcatctcacagagttaaacctttattttgattcaccaggttggaaacactcgttttgtgaaaactgcaaagggacatttcagtgcccacagaggtctatgcttaaaaaaaaaaaaaaaaaccaatatccctagataaaaactagaattaagctatctgtgaaactgctccgtaatgtgtggattcatctcacagaattaaacctttcttttgattcagcaggatggaaacactcttttggtacaatctgcaaagaaaaatttgggaaccctttgaggcctgtggtgaaaaaaaatcccagataaaaactagaaataaggtgtttgtgaaactgctgtgtgatatgtggattcatctcacagggttaaacctttgttttgactcaggagttgtgaaacactttttggtagaatctgcgaagggatattttgaagcccattgaggtctatggtgaaatacaaattatccccagattaaaaaaaaaaagaagaagctatctgtgaaactgatttgtgatgtgtggattcatctcacagtggtaaacctttcttttgattcagcatgttggagacacttctttgctagaatctgagaagggacatttttgagccccctgtaatatggtgaaaaatggaatatagcaaaataaaaactagaaagaagctgtctgtgaaacttctttatgatgtgtggattcatcccccaagggttatcttttctgttgatttagcaggatgccaacactccttttgtaaaatctgcaaaggaacatttgggggtccattgtggcttatgttgcaaaaccaaatatcccaagataaaaactagaaagaagctatctgtgaaactactttgtgatgtgtgaattcatcacatagagttgaaactttcttatgatagagcagtttgtgaacactttaggtagatagaatctgtgaaaagacatttgatagccaatagaggcctacactgaaaaacagaatatgcccagataaaaactagaaagatgatatctgtgaaaattatttgtgatgtgtggatttatcttacaaagttaaacctttcttttgattcagcaggtatgaaacgctattttggtagaatctgccgagggactcttgggagacaattgaggcttattgtgaaaatcagtatgttcccagatgaaaactacaaagaaggcatctgtgaaactgagttgtgatgtttggattcatctcacagatgaatccaatcctttgattcagcaggttggaaacaaacactctttggatagaatctgtgaaaggacatttgggatcctattgaggcctatggtaaataacctaatatccccagataaaaactagaaagaaactatcagtgaatcttctttgtgatgcatggattcatttcacagagttaaaactttcttttgattcagcaggctggaaacacctttttctagaatctgcgaaggggtatttgtgagacattttaggcgtataatgaaaaactgaaaatccacagaaaaaaccataaggaagctctttgtgaaactgtttgggatgtgtttattcatctaacatagttcaacctttctgtcaatatagcgtgtttgaaaaatgttttagatagcatctatgaagggatatttaagagcccatagaggcctatggtggaaaacagaatatccccagataaaaagtagaaaaaagctaagcatataactcccttctgttgtatggattcatctcacaaaattaaacctttgttatgacacagcatgtatgaaacactctttagttagtatcggtgaagggacatttacaagcccataagggtctatagttaaaaactcagtaactccagattaaaaactagaaagaagctatctgtttaacttacttgtaatgtcaggatttttcttaaagagataaacatttatattgaatcaacaagttggaatcactctttttgtagaatctgccaacagacattatgatcccttagaggcctattgtgaaaaactgaatataccttgataaaaactagaaagaagctatctttgaaactgtattgtaaagtgtggattcatctcacctggttaaacatttccctgaattcatcaggttggaaacgcatttttgtagactctgtgatgagacattgtggagcccattgagtcctatggtgaacaacccaatatttccagataaaaacctgaaggaaactatctgtgaaactgctttgtgatgtgcaattcatctaacagatttcaactttttttttattcagtaggttggagacactcatttgtagaatcagcaacaggatatttcagaacccattgaggcctatggatgaaaaccaaatatcccaagatcaaaactaaaaaggagctgtcagtgaaactgctttggatgttttgatttagctcacagaatcaaaactttgttttgattcatcaggctgtaaacagtcttttggtagaatctgcataggaacttatcacatcccattgaagcctaagcagaaataatggatatccccagataaaaactagaaagaagtgatttctgaaactgcattgtgatttgtgcatttatctcacaggattaaatctttctattcattcagcaggatggaaacacttgttgtagaatctgcaaagggacatttgggagcccttttaggcctatggtgaaaaaccgaatatccccagataaaaactataaagaagtgatcagtgaaactgcttttttgctgtgtgtatttatcttacagacttaaacctttcctttcattccacaggtttgaaacactcattttgcagaatctgtgaagggacattccggagcccctagaggcctattgtgaaaaagaaaatattcccagatgaaaactagaaagaagctatctgtgaagtgctctgtgatgtgtggagtcattgcacagagttaaacccttctattgatacagcaagatggaaacaatctttagatagaatctgcaaaggaacatttataagcccttagaggactatggtgaaaaacaggatatccccccataaaaactatcaagaagctatctgtgaaactgctttgttaagtgtggaatcagctcaaaggcttaaaactttcttttgaatctgcaagttgcaaacattcttttgctggaatctgtgaaggaacatttgcaagcccattgtagcacactgtgaaaaatggcatattcaaagataaaaactagaaagaagattttagtgaaactactttgtgatgtgcagattctactcacagagtttaacttttctattgattcagcaggttggaaacactcttttagtagaatcaggaaagggatatgtgggagctctttgagacctaaggtgaaaaattgaatattcccagataaaaatagaaagatgttatttgtgaaactgctatatgatgtgtggattcatatcacagagttaaaccttgtgtgggctggtagagtctcctattagaatatctggggttgccctgttgtctttatcattagactgcttggggtcagccaggagtctctcccactagaatgcatagggttgccaaggtatctctatcattacacttcctggggtcagacaggagtttcttcctttagaatccctgcaaacccccacttttctcatcgttagacttccaggggttggctgagagtctctcccactaggatgcctaaagtcaaccaggtataccaaccttagactgcctagggtcagccaggagactcttccactagaatgcatgggtttgctaaggtgtctccatcattacattgcctggtgttggcaagaagtctctcccattaaaataccaaaggccagccaagagtctctcccattagaatgcctagagtcacccagttgtctctatcagtagaatgcctgagttcagctgtgaatctctttcattaaaatgcctgagatcgtccagctgtctctaacattacgctgcttatagtcggctgggagtctctccctttagaatacctggggtcagccaggtgtctgtatcattagactgcctggggttggtgagaatctctcccattaaagtgcctgagatcacccaagtgtctttatcattacactctctgcagttggccagcagtctctcccataagaatgccacaggccacccacgtgattctaacattagactatctggggtcggccaggagtctctcccattggaatgcatgtggtcacccaggtgtctctatcattagactgcctgaagtcggccaaaggacttttccattataatgtctggggtcacccaagtatctctctaattaaactgcctgtggtcagaaagaagtctctcccattaaaatccctggggtcacccaggtttctctctccttaggctgcctagggtgggacaggagtctctgcattagaatgcctggggttggtggggagcctctcccattagaatgcctacagtcgcccagttgtctctatcattagactgcctggggtcgcctgaaactctctcccattagaaagtctgggtgcgggccgggcgcggtggctcacgcctgtaatcccagcactttgggaggccgaggtgggcggatcacgaggtcaggagatcgagaccatcccagctaacacggtgaaaccccgtctctactaaaaatacaaaaaattagccgggcgtagtggcgggcgcctgtagtcccagctacttgggaggctgaggcgggagaatggcgtgaacccgggaggcggagcttgcagtgagccgagatcccgccactgcactccagcctgggcgacagagcgagactccgtctcaaaaaaaaaaaaaaaaaaaaaaaaaaaaaaaaaagaaagtctgggtgcgtgcaggtgtctttattgtaagactgcctggggttgaccaggagtctctcctattagaatgcctgggattgttcagatgtctctatcattagaatgcctggggccagcaagcagtctttcctgttagaatgcctgtggtggcccaactgtctctattattagactgactgaggtcagccaggagtctctccaaaaagaatgcctggggtcatcagggagtcttcctcattagaatgactttggtctcacatatttctctaccatcagactccctaagagtggctgggaatctctttcatcagaatgcctgggacacccaggtgtctttatagttagactgcatagggtaagcaaaaactctctcccattagaatgcctggtttcttctgagagtctctcccattagaatgactgtggtgacccaggtttctctataattaaactgcctggggtcggccaggagtctttcccattacaatgcctggggtctccaaggtgtctttattatttgactgactgtgctaggctgggagtctctcccatatgaatgcctgtggtggccaagttgtctctatagttagaccacctaaggtcaaacaaaagtctctcattagcatgccaggagtcacagaggtgtctatcattagactgcctggggttggctgggagtttttctcattagaatgctgaaggtcgcccaggtgtttctgtcattaggctacctggggttggccaggattttctctcattggaatgcctggagggtcgcccaggtgtctctatcattaaactgcatagggtcagcaaggagtctttcccattagaatgcctggggtcagccaagtgttttcattcttagactgcctggtgttggctaaaaggctatcccattagaatgcctggggtcccccgggagtccctcccatcagaatgcctggagccacccaggtgtgtctgtcattaaactgcctgggtttggcccggtgtctctcacattagaatgcttgggtttgcacaggtgtctcgatatttagactgcctgggctcagccaggagtctctccaattagaatatctgggtttgtccagagtctatcccattagaatgactgggatctcccaggtctctataattagacttcctgagtcagccaggagtttctcccattagaatgcctagaattgacgaggtgtctctaacattagactgcctggggttggctgggtgtctctcccattagaattcttgaggttggctggatgttactatttttagaatgcctgaggtcgcccaggtgactctattattaaaatccccaggttcggatggaagtctctcccattagcatgcccagggtcactcaggtgtctctaccatgagacttcttggggttggctgggagtgcctcccattataatgcctggggtcgcccaggtgtctctataattagagtgcctggagtcagccaggagtctctcccattaaaatgccttgggttgcccaggtgtctctattattagactgccaggggtccgacaggagttactcctgtaagtttgcctgtgatcgcttgggtatctctataattagactgcctgagaacagccaggagtctctctctccaattaaattgcctggagtcaagtgggagtccttcccattagaatgcctgtggttgcccaggtgtctctgtcattagacagcctgtagtcagccgagagtctctcccatcagaatgcctaagttcacctaggtgtctttattattacactgcattgggtcagccaagagtctctcctactagaaagcctggaatctgccaagagtctgtcccattagaatgcctgggttggtaaaggtgtctctattatataatgtctgggattggccgggagtctctcttattacaatgtctggggtcaaccaagtatctctataattacactacctggggtcgaccaggagactctcccattaaaatgcctggggtcacttaattttctctataatttgattgcctggggtcagccaggagactcttccaagaaaatgccagaggttggctgggagtctcttttattagaatgactggggtccaccaggtgtctctattattatgcaacctggggctggtcaggagcctttttcattaaaataccttgtaggggtgggttgcccctacacacctgtgggtgtttctcgtaaggtgggacgagagatttggaaaagaaaaagacacagagacaaagtatagagaaagaaataaggggacccggggaaccagcgttcagcatatggaggatcccgccagcctctgagttcccttagtatttattcatcatttgtgggtgtttctcgaagagggggatgtgtcagggtcacaagacaattgtggggagagggtcagcagacaaacacgtgaacaaaggtctttgcatcatagacaatgtaaaggattaagtgctgtgcttttagatatgcatacacataaacatctcaatgctttacaaagcagtattgctgcccgcaggtcccacctccagccctaaggcggtttttccctatctcagtagatggagcatacaatcggattttatacctagacattccattgcccagggacaggcaggagacagatgccttcctcttgtctcaactgcaagaggcattccttcctcttttactaatcctcctcagcacagaccctttacgggtgtcgggctgggggacggtcaggtctttcccttcccacgaggccatatttcagactatcacatggggagaaaccttggacaatacctggctttcctaggcagaggtccctgcggccttccccagtttttgtgtccctgggtacttgagattagggagtggtgatgactcttaaggagcatgctgccttcaagcatctgtttaacaaagcacatcttgcaccgcccttaatccatttaactctgagttgacacagcacatgtttcagagagcacggggttgggggtaaggtcacagattaacagaatctcaaggcagaagaatttttcttagtacataacgcagaagaatttttcttagtacataacaaaatggagtctcctatgtctacttctttctacacagacacagtaacaatctgatctctcttgcttttccccacatttcccccttttcttttcgacaaaaccgccatcgtcatcatggcccgttctcgatggtcgctgtctcttcggagctgttgggtacacctgcagactaacaacagacaaaacaggcacacaaggattaatatgagatttataatcgtagtacttccaatggtcttaacccaagtgacagggttaagatttgcgaggccatcagcaactcctgcaattgcctcagttcctggcaccaaatttaaatgggcttttgatgcttcgaaaatttgttcttttaatttggaaatgtctaaagtgagattatcttctcttccctgtagatggcgtctaaccatgtcccagtgatgctcagactcattataaatttggggtgtaatagaaaaatctgacgtattccagtcacattgtaactggaaacgatgttctaagctcatgagcctgtctcccatccaaatgacagtttgtctaagatcattaatttgatttgccaatttttgatcaatactagattgtgaattccacaatcttgtagaatttttttgccaatcattaacaaagtttactgactgaacagaagagtgcaatgcaactcctgctacagcagccgtagctgtgactgcaattaatcccataatcactgctattaaagtaaaaatgaatcttttggatctatttaaaacaccttttaatacttcagtcaaagtatggatggatggtgaggcctcccacggtcggtccatggacacagggatccacacgccctctcttgctctcaccagcagaatacggtgttgccaattaaaagttgaatcaatgcaagtaagcaatctacaattttcacaggttatagtctgggagtctggtttaataactatatttcctacaactagcatataagggggctttatgcaactttgtaaaggaactgttagactggaatttaggtcgacagtataaaatggcttacgatctcttgtttctaaagtttgatttccagaccaaattctaatgtggtgtgaggccacagtaagcctccataattctggatgttcaggaccagaaacaggacttattatttttggtcttggggtagagattcctttttctccccattcccaagggtagaaagactgcaattttttatgcttatgtttgtctaaactttctgttaagtcgctatcaacagctggactcacttgtgcacttggacacgactgagtttgtcctgagcaattgtggtagaattgacctcgaggtgcccaatctataatagttccaaattcattgttttgtaatatcaccgcactattggccacacattcttcccaaactaaaacttctgtattttttgattctttgggaatttccttggggcaaggtttccctttaggtctaaatttaaatgatctttgataagaaaagtcttgtaaataatttacccgtggcctgagtgacatcccgcttaccatgtgataagtgaatctactgatgggactgacagtaggtacttctaccaaccaattttggactgcaggcattaaacatcctggtgctctccctaggcaaataggaggataacgatacccaatggaaatatttatcatcatcccttcttcctcaggtttggcagggcagtgatcatctgtggggccaggtacccatacactatcattaacatatacttctataggattatccatccatgtgactgcccgaattaagggcgggaaaggcacataggcccagtaggtatagttagctgcagctgctcctgcaggcatagggagacttaccaccattgatacaatcatcaaggctgcaagcagcatactctctggggtttgtgtcacctttgtgttctctagatattttgtagctaactgcgtcagcttctttagttgtgcccaagtcggcggctctgctttcttggtggatggcaacttcatctgttcttctgacgtcaccattttgttcatcttgtgagtcaacggtgctcgattgcggtgtctccgtctccgcggaggtgcttttctttgcatctccgatgggttcattgtagaacttcaaatgtctagtgggtatccaaacaggaagctgattttctcctggtgaaacacaagcaaaacctctcccccacgttatcaccttccctatttcccatgtcttatttttattatctttccaccaaattagttttccttcatgtgggctgttctttttaccagtaagatgttgttctgcagaagtagtagtctgatttctataaatgtttaaaaaatttaaagtatagagtgctagattaagttgcatctgaggagtggtacactccttactgtctcccccttctttttgtttaactaattgagttttgagtgttctatttgttctttcaactatggcctgtccttgggaattataaggaattcctgttgtatgtgaaattttccactgacttaagaatttttggaaagctttactacaatatcctggtccattgtcagttttgattttttctggaactcccattacagcaaaacaagacaataaatgttttttaacatgggaagtactttctcctgtttggcaagttgcccatatgaaatgtgaataagtatcaactgttacatgaatatatgataatcttccaaatgaagatacatgcgtgacatccatttgccataatgcattaggacacagacctctgggattaactcctgcctcttgagtgggcaggtgtaagacttgacactgggtgcaatgttgtacaatatcttttgcctgtttccatgtgacatcaaatttgttttttaatcctgctacatttacatgagtcaaagcatgaagttcttgtgcttttatgagtgcagatgataccagtaagtcagcttgttcatttgctttagtcaaaggccctggtaaattagtgtgtgctcgaatatgagtaatataaaatggaaaatttctttttcttttttttttttttttttttttttttgagacggagtctcgctctgtcgcccaggctggagtgcagtggcgggatctcggctcactgcaagctccgcctcccgggttcacgccattctcctgcctcagcctcccgagtagctgggactacaggcgcccgccactacgcccggctaattttttgtatttttagtagagacggggtttcaccgttttagccgggatggtctcgatctcctgacctcgtgatccgcccgcctcggcctcccaaagtgctgggattacaggcgtgagccaccgcgcccggccggaaaatttctttttcttacagtttgttgtaataaattgaatagctggtttaactgatcatccatgctatatttaattagagctgtctcaacatcccttgtagcttgtactacatatgcagaatctgatataatattgataggttggtcaaaatcttgcaacactgtaatgactgcaaccaattctgctctttgagccgattgatattgagttttgattactcgttctttcggccctgtgtaagctgcttttccattgctggaaccatcagtaaatactgttagagcattttctaaaggttcacgtctggtaattttaggtagaatccaagtagtcatttttaagaactggaagatctttgtttttgggtaatgattatcaataattcccacaaaattagcaagaccaatctgccatgcaccagaattgataaaggcttgtctaacttgttccttggttaaagggacaactattttgtctgggtcatttccacataattttattattcgtaatcttgtctgaccaattaatgtagccatttgatccaagtacaatgtaaaagtcttaactgtactgtgaggaaggaatgaccactccacaagatcagtattttgaataatgatgcctgttggagaatgtgcagtggcaaaaatcaaaagttggagtgtggctaagggatctattctatttatttgcgctgactgaattttttcttccactaatttaatttcttttgttgcctctggggttaacattcttttactatttaagtctgagtctcctcttaagatagagaacaaatttgacatggcataagtaggaatgcctagagttggccgaatccaattaatatctcccagcaatttttgaaaatcatttagtgtttttaatgtgtcttttcttatttctatttttggtggcttaatttttctattttctatctgcatccctaaataatgaaaaggagtagaggtttggatcttatcagatgctattgccagtcctgcgttggcaacctctgcttgcagaaatgtataacagtcaattaatttatctttcgtttctgcagcacataaaatatcatcaatataatgaatgatataacagtctgaaaacttttctctaactggttgaagagctcgacctacaaaagtctgacaaatagttggactattaagcattccctgaggtaacactttccactgaaacctggtggctggctctttattatttatggctggtatagtaaaggcaaatttttcacaatcctgctctgccagagggatggtaaaaaagcaatcctttagatcaattataattaaaggccaatcttttgggatcatggccagagagggcaacccgggttggagaggccccatgggttgaattacggcgtttacggcatttacggcccttaagtcagttaacatacgccatttgcctgatttcttctgaattacaaacacaggagaattccaaggtgagaatgaaggctcaatatgacccttttctaactgttcatttgctaataaatgtaaagcctccagtttttgttttggtagcggccactgatttacccacactggtttttctgttttccaagttaatggtatgggtttaggaggctctacagtggccacccctaaaaaggataccctattccttctcttttttgatttattttagcctcaactggaattttaatgccatcttcatttttccctagtccctttcctggtatatatcccatcttggtcatgattttttgactcgtggggctatataatggagcaggcatggtgatttccgcaccccattgttgtaataaatctcgaccccacagattaagaggaattgaagtaatcattggctgaacagtactttcttgattatctggccctaagcaatgtaaaatctcagtactttgatacacttctgaggctgtgcctatgccgacaagtcctgtaacagccttttgtttaggccaattttttggccactgatttaaagcaatgatagagacatctgctccagtgtctaccaacccttcaaactgttttccttgaataatggccttacacacaggtctgttctctgagacctgacttgcccaatatgcagcctttcctgttggatcagtgcttccaagccctcctattctttttatttcactatttccaccctttaatatatggcaggagtaataattgagcaatcctgtctcctggactggcactccaaggaattgaagagctaataaccaactgaatttcgcctttatagcctgaatcaaccacaccagtatgaatttgaactccttttagatttagacttgatcttcccaagattagtcctacagtcccctcaggcagggggccatatacccctgtggggattttttgtgggggctcccctggaagcagagagactgcttgtatagtacataaatctactgctgcactgccgcttgtggcgggggacaattgttgtattgtggtaactggcttattccctgaaacacttgggacagtgggggttgttgtccctgaaaaccatgaggaacaaatggctgaattgggaatgccccagtttgttgtggggcctgaggctggcccctttgctcgtttcccgacaatggttgcccatttttatcaaatttagaacgacattgactagcccaatgttttccttttttacatcttggacataagtcaggtggctctctacctgttgtagttgcttgaatagttatattctgtttgtttaagactgggcaattcttttttaagtgaccaatttgaccacaattgtaacattttcctccaaatgttctgacttgtcctcctaaaacaactcctgttattgcttgagccataagcatagctttatgcatagctcctcccattccatcacaggcttttacatattctgagattacatctgatcctgcaggaacctttccttttaatggcttaatggctgattgacactcaggattggggttttcatatgccatcaactccactatgaccttacgggctttttcaatggcaattgacttttgagcaacatcttggagccttgccacaaaatcaggatagggctcttttgaaccttgtcttactgtattaaatgaggggcaggtacttcctgggtcttggattttttcccaggctctaaggcagatagctctaacttgctcaatggcctcattttgcattaatgcttgttgactaatagtactccaattttgacctattcctaatagttgatctgcatctatgttaactggaggattggcagccctatttcttcggacctgttcttgtaccccatcaatccaccaagtcttaaattgtaaaaattgagagggtgagagagacgattttgccagaatctcccaatcataaggaatgagtctatgtccatgagcaatggaatctaataatgtcctcatataaggggagttgggtccatactgttttactccctctttcatatcttttagcatttttatcgaaaaagacttgtatctggcctcaactgtgggaggctctccctcttgggctccttctccaggtggcatcggttctaacgttactgggaattgccatgcctcagtatctccttcctttcttgatttatcaataatttcatgtaattcactaccccgtctactaggtggtgccgtaggattaagtctcctagtgggcggctgagggtatggcgccctgccctgtggtgctgggggcattcctggatatccatactgactttctaggggtggccgatactgaagttcagccggcggccagtattgataggctactggcggttgggtcttattttctttaacctgcgtttgaggttgtaatgttacgggcacctgacctgctggaagacgacttgtgcctcgtggtttagactctgatggccccactaattctggaacttttccttctaattttaacgtttcaggatatatcacctcctgtaattgattatagtcaacattttgcgttgactgagccattaccggctctgctacatattcgcaatgtaaactttccgtttctttctgggattttttccttgtgttttcattacaatctattatacagcttccaggggcatcagaaactgaaacgctatcttcttctgtttgaaatggttctaaagctgctttaataatggcccaatcattccatactgtaagtggaatgatattacccttcctacctgcttgttttagttccttaccaattcttttccaatcttttagatctaaagttccttgttctggaaaccatgggcaaaattgttctattatttgaaatagcttgattagattttttgtagatactttaactccccctctttttagaagaattttaataaagctgagataagaggcatatttacttttaattttacttttagtttgccccattatcaccctagcttcttctgagcgcacaagcttactgtaaggctgactgtagacgtactcaggatctctcgtcgacttgtcctcaatgaccacgctcgagcgtaccttcaccctagagaaaagcctccacgttgggcaccagatgtaggggtgggttgcccctacaatacctgattttgtccgaaaatctattccattagaatgactagggtcacccaggtgtttctataattagactgtctgggtctgccagtagtttctcccattaaaatgcctagggtcgcccaggtgtttctataattagactgtctgggtccaccagtagtttctcccattataatgcctagggtcaacaaggtgtctctataattagacttcctggggtcagccaggagtctcccataaaaatgcctagggttgcccaggtgtttctatcattagactgcctggcatcagccagaagtctctccaattaaaatgcttgggtcactcaggtgtatctatcactagactgcctggggtcaggtgggagtttctcccgttggaatgctcggggatgaaaaggtgtctctatcattagactgcctgaggtcaaccaggagtctctcccattcaaatgcctgcatttgcccaggagtccctattcttagactgcctggggttggccaggagactctccaattagaatacctggattcctctgggagtctttcctattagaatgactgtggtggctcaggtgtctctataattacactaccttgggttggccaggagtctctccattaaaatgcctggggtcgaccatgtgtctctatcattagactacctgaggtcagccagaagtctctcccattggattgcctggggtcggataagagtctcattttttaagaatttctggggtcaccaagttgcctctatcattaaaatgcctggggtctactgggagtttctcccattagaatgtcagtggtcgcaaaggggtctctgaaattagactgtctgcagttggtcaagagtctctcccattagaatgacagtggtcttcaggtgtctctataattagaatgcctggagtcagccaggattctctgtcagtacaatgcctgggatctctcaggtgtctctataaatagaccacctgggttcggacaaaagtctctcccattagaatgccaagggtctccaaggtgtctctattattagacttccaggggtgggctgggagcctcttccattagaattctggggatcacctaggtgtttctgtcattagactacctggggtcagccaagagtctctcccattgaaatggctggggtcgcccaggtatatttatcactagactgcctggggttggccaggagcctctaccatggaaatgcctgggagtctttcccattgaaatgcctgggttggcctaattgtctttatcattaggcttcctcacttcggacagatgactctccaattagcatggctgcagtcgcccaggagtctctcccattagaatgcctggggtcagctgaaagtctcttccattagaatgtctggactctcctaggtgtctctacctttaaaatgcttgggtttagacaaaagtctctcccattaaaatgccatggctcttgaagctgtctctatcattagaaagtattgggtcagacagcagactctccgattagaaatcctagtgtcactcagatgtctctataatgagactgccctgggttggccaggagactctaccattataatacgtggggtggcccaagtgtccctataattagactgcctgtggtcaacaagttgtctctcacattagaatgcctggtctcgcccaggtgtcttcattcttagactgtcttgggtcagccaggcgcctctcccactagaatgcctggggtctgcccaaagtctctcccattagaatgcctggggtctgcccaaagtctctcccattagaatgcctggagtcacccaggtgtctctatcattagactggatggggttgggccagagtctctcccgttagaatgtctggggtcgctgaggtgtctctataattagactgcctggataaggtcaaagtctctccctttagaatatctgttgtcgcccagatgtctctatccttagactgccttggataggccagaagtctcttctattagaatgcctatggtcatcggggattctcttccattataatgactggggtcgtctaggtgtcttttttattagactgcctggggttgcccaggtgtctctaataatgaaactgcctggggccaaacaggagtctctctaatctgaatacctggaatcaaccaggtgtctctatcattagactgcattgtgtcagctgggagtctctccctttagaatgctggaggtcacccaggtgtttctgtaattagactacctaatctgcccaatggaatgtctgatgtttcccatgtgtctctatcattagactgccttgggtcggccaggagcttctcttattagaatgtctggggtcacccaggtgtctctataattagaatgcttggggtcagcaaggccctgttgaatatctggggtgggtcagttgtctccatccttagacttcctggggttagcctggagtctttcattagaatgctcggggtcagcctagattatctcctattagaatgcctggagttgcccaggtttctctatcattagactgcctggggttggccgagagtctctctcattagaatgcctggggcctactgagaatctctccctttagaatgcccaaggtcacctaaatgtctgtatcactaggctgtctggggtctgccaattgtctctccaattagaatgtctgtggtcgaccatgtgtctctatcattagactgactggtgttggccaagagtctcccattagaataccttcagttggccgtgagtctcttccattagaatgccttgggtagtccagagtctttcgtattaaaatgcttggggtttccttcttgtctctatcattagactctctcggattggacaggaaactctcccattagaaagtctgtgggctcccaggtgtctctatcattcgatgtcctgggaatgtccaagagtctctcccattagaatgcccgaagttggccggaagtctctcccgttagaatgcctgcagtcacccaggtgtctctatcaatcattagaatgcttggggttggctgggagtctctcccattaaaatgccttgggtggttcaggtgtctctatcattaaaatgaatggggtcggctggcagtgtctcccattagaacacctgatgtcaccaaggtgtctctataaagactggttttgctcggccaggtgtccttattcttagactgcctgtggtcagccagaagtctctttcattagaatgcgtggggtcaaccaaaaatctctccattataaagactgtggatgcccaattctctctataattagactgcctggggtcaaccaggagtctctcctattaaaacgcctgtggcaaaccaggtgtcttcatcattagactgcctggtgtcagcgaggagtctctgccattagaatgcttgtggtcagttgagagtcttttctgttagaatccctgggctctccaatgtgtctctgttattagaaagcctggggccatccgggagtctctccaattagaatgcctggagttgcccaggtgtctctattattagactgccagaagtcagccagaaatctctcccattagaatgcttggggtcgcccagtaggctttatttttagaatgcccatggtggggcaagagccccttccatgaaaatggctggtgtctcccaggtgtctccatcattagagtgcctgcggtcggctgaaattctctcccgttagaatccctgagatcactcaggtgtctttatcgttagactgcctgcggttggccgggagtgttttccagtagaatgtctggtgtcaaccaggagtcttactctttagattgcctgaggtcggccaggagtttcttcattagaattcctggggtcggctgaaagtctctcttattagaatgactggggttgtccaggtgtctgtatcattatagtgtcgtgggtcacccagagtgtgtcctattagaatgcctggggtcacctaggtgtctttataattagactgcttgggctcagtcagtgatctctcccattagaatgcctggtgtggcacaggtttctctattattagactgcatgcagtctgctgggagcctctcccattagaatgcctggagtcatccagggctctctagcattagacttgctgcggtcggccggaagtctccacattagaatgcttggggtcggagggagtatctcccattagaataattggtgtcgtccaggtgtctctaatattagaatgcctggagtaggccaggagtctttcactttagaatgcctaatgtcgtgaagtttctctataattagactggggtcagccaggagtctctcccaaaggaatacctggtgtctgctgaaaatttctcccattaaaatgccatcaaaatgcttgtggtcagttggaagttttttctattagaatgcctgtcatctccaaggtgtctctattattagaaagccaggggctagctgggagtctcttcaattagaatgcctggagtcatccatttgtctctatcattagaattcctgaagtcatccaggagtctctcccattacaatgacatgggtcggccaaatgtttccatcattagaatgcctgccattggccttgagtctctcccattagaatgcctgggatcacccagatgtctctatcattagactgccttggatcagccaggagtctctcccattataatgcctgggtttacttaaatgtctctataattaggctgccaggctcttccatgagtctctcccattaaaatgtctggagtcgcccaggtgtctccatctctaggctgcctggaattggccaggagtctctcccagtagaatacctggggttgtccaggtttctctatcactagtctgcctgggttcgactgggagtctcttccattagaatgcctggggttgctcaggtagctctttcattagactgcttgaggtcatccagaagtctctcccattaaaattcctaaaatcgcccaggtgtctccataattagactgccagggattggttaggagtctctcccattagaatgcctgtggtcgcccaggtgtctgtatactttgactgcctgctgttgtccaggagtctctcattagaatgcttgaggtcgtccccgagttcctcccattagaatgcctggggtcacccaggtgcctctaccattagaccacctgggttccatcggatatctctcccattacaactcctgaagttgcccaagtgtctttattattatactgccagggtttggccagaagtctccttcattagaatgcctggggatgcccaggagcctctaaccttaaattgccaggggttggcctaaatccctcccaagagaatgcttggggtcggccaaaaacctcttcaattagaatgctgtttgttgcccaggtggcccatcattagaaagcctgtgttcagctgagagtctcgcccattagaatgcctggggtaatttagatgtctgtataattagactgcctggagtcagccaggaataatacctgcatttgactgggagtctttcccattagaatgcctatggttgctcatgtttctctatcattagaatgtctgggttcggccaggagactctcccattagaatgtctgtagccacccaggtgtctctatcatttaactgcctggcatcaactgggagtctctacattagaatgccttgggtcgaccaggtgtctctattgtttgactgcctggtgtcagccaaaagcctctccattagaatgcatgggtctggccaagaatccctaccattagaattactgggattgtccgggtgtctgtatcattagactgtctggggtcggctgggaatctctcccattaaaatgcctagggtagcccaggtgtctctatcattggaatgtctggggctggccgggtgtatttcccattagaatgactgggattctccaggtgtctctatcattagactgcctgaggtcggccgggagtctctccaattagaatgactggagtcgcccaggggtctctatcactgggctgcctggggtcggccaggagtttctcccattagaatgctttgggctgactgggagtctctcccattagaacatgtagggttgcccaggtgcctctaacattagactgcctggagtcggctaggaatctctctcattagaatacctggggtcgcctaggtgtctctttaattattctaccaggaatccaccaggagtctctcgcatgagaatccctgttgttgcccatttgcctccatcattggacagcctggggtcagctgagagtctctctcattaaaatgcctggggttgcctaggtgtctctaacattagactgcctgtgttcatccaaaacttctcccgttagaatgcctgaagatgccaatgtgtgtctataattacaataccttgggtctgccaggagcttctcccattagaatgccagaggtcgcccaggtgtctattcttagacagcctgcattcagccaggagtctctcattagaatgcctggtgttggcagaaattatctttcattagaatgcctggggtcacccaggtgtctctattattaggctgtctgagtttggcagtgagtctctttcattacaatgcctgaggtcgcccaggtgtctctatcattagactgcttagggttggccaggaatctctcccattcgaattcctagtgttgcccaggtgtctgtaattagacttcctgggttcaaccaggagactctcccattacaatgcctggggttgctcaggtgtgtctatcattagactgcttagggttggctagcaattctctcccattcgaattcctagtgttgcctagatgtctctataattagactccctgggttcaaccaggtgtctctcccattagaatgcctagggtcgctcaggtgtctctatctttaaactgcctagggtcagccaggagtctcccattagaatacctggggtcgccaaggtgtctctattattagaatgactggagtcagtggggactttcacctccattagaatgcctaaggtcatctagatgtctctataattagactttctgtggtcagccaaacctctcttccaaaagaatgcctgcattcttccagaagtctctcccattagaatgcctgaagctgctcatgtctgtctgtaagtagactgcctgggtcagtcaggagtctctcccattagaatgcctgaggaccccaagctgtcactatcatgagactgcatggtgtagcccaggtgtctttatcattaaacttcctggggccagccaggagtctatttcattagaatgcctgcagtagcccaggtgtctctattgtgagacttcctagggtaggaagggagtctctcccattaaaatgcctggcgtctcccaggtgtctctacaattagtctgcctggggtcagccagtatcctctaccattagaatgcctggtgtctcccaggtgtctctataattatattgtctgagtaagctaagattctctcccatttaaattcatggggtcacccaggtttaattattcttagactgcccagtgtcagccaagagtctctggtattaggatgactgatgtcgccctggtgtctctataattacctgggtttggccaagagtctctctcattaaaatgcctaaaatcgaccaggtgtttttatcattagactgcctgcggtcggccaggggtctctcccattagaatgcctggcgtcggccaggagtcttttggattagaattactggggtggcccaggtgtctttattataatgcctagggtcttctgggagtctctcccattagaatgcatgctgtcgcccatgcgtctctatcattagactcactggggtcggctgggagtctcttttattagaatgcttggagtgggctggaagtctttcccattagaattcctgtggttggcagggagtctttcccattagaattcctgtggttggcagggagtctttcccattataattcctgggatcaaccagttgtctttatcattagaatgcctgggataggccaggagtctctcccagtagaactcctactgtcacccaggtgtctctaccattagaatgcctagggtcagccaggagtctttccaattagaattactaaaatcgcccaggggtctttattattagacagcctgggttcggctgggagtctctcccattagaatgactggcattgcccaagtgtttctatcattagactgtctaggtttggccaggagtcattcacattagaatacctgtggtcgcccagttgtctctacaattagaatgcctaggttcttccaggagtctctcccatttgaatgccttgggtcacccaagtgtttctatcattagactgccttagttctgccagaaatctcttattttagaatgcctgtggtcgacctcgagtctctcccattagaatgacttgggttgcctaggggtctctatcattgaactgcctagcatctcctgtgtgcctcttctattagaatgcctgtgtcaccctgttgttcctatctttagactgcctggggtcagacgggaatctctcccattagaaagccaggagttgcccagttgtctctatcattagactgccttgtgttatccaggagtctctcctactaaaatgcctggtgtcacccaggtgtcttcattattagactacagggtgttggccaagagttgctaccattagaatgcctggggtgggccaggagtttctcccatttgaatgcctgaggtcgtttagctgtctctgttattagactgcctggaatcgacgggaatatcttctatcagaatgcctggagatgcccaggtgtctctcttgttagactgcctgtggtcagccaggtgtctctcccatgagaatgccaggaatcgccaagttgtctctatcattagactgcttggagtcagccaggagtctctcccattagaatgccttgtgtcacccaggtgtctatctttagaatgcctgaggtcagccaggagtctctcccattagaatgcctggggtcacccaggtgtttccatcattagactgcctgtggttggctgtaaatctctatcattagaatgcctggggtcacccaggtggttctattatactgctctgggtccaccaggagtctcttccattataatgcctgggctttttcaggtgtacctataattaggcttcctgggcttgaccagaagtctctccatagaatgcctggggtcgcccagttgtctctatcattagcctgcctgtattcggctgggagcctttctaattagaatgcctggggtcgcccaggtttctctattattagaatgactgtaataaccccgtgtgtctataattagaccctcaggggtcggccaggagtctctcccattagaatgcctgtggccactcaggtgtctttatcctaacattgtctgtggtcagccacaagtctcccattaaaatgcctggggttcaccgggagtctctccgattagaatgcctggggtggatattgtgtctctatcattagactgcctgggttcaactgggtgggtctctctttaatttgcctgaggtccttaaagtgtctctatcattagattgcctggggtcacctgggagtctctcccattagaatgcctgtggtcgaccaggtgtctttattcttagacggcctggggtcgaccacgagtctttcccattagaatgactggagtcatccagaattctctcccattagaatgactgtaatcgcctggtgtctctataattaaactgcctggcattggccaggattgtcttcctttaaaatgcctggttgtgaccaggtgtctctatcattagactgcttgggcttaaccaggagtctctcctattagaatgtcttacatcacccaggtgtttctataattaattgcctggggttggccaagtatttccttcattagaatgcctgctgtcacccagatgtctctgtcaattggccctgtggggtcagccgagagtctttttcagtataatgctttgggtcacacaggtgcctctctcattagactgcctggggttgtccaggtgtctctcaaattagaatgtctgggatctcccaggtgtctctatcattagacttcctgaagtctgctggaaatctctaccattaaaatgacttgggtcacccaggtgtctctatcattaagctgcctggatttggcagtgaatccctgccattagaatacccggggtctcccgggtgtctctatcaatcgactgccagggtcagctagaagtctctcccattgtaatgacttgggtacctcagagtctctcccactaaaatgcttggggtggtccaggtatctttagcatagaatgcctgtggctggctgggagtttctcttattggaatgccaaaagtcgaccagatgtctctatcattaggcagcctgcggtcggccaggagtttctttcattagaatgcctgggctctgccgttagattgcctggcattgcaaaggtatctttaccattagaatgcctggtgtcaacctacagtctctttccttggaatgcctgaagtggctcagttgtctctatcattagacagcctgtggtcagatgggaatctctccaattagaatgcctgaggtcgttcgggtgtatctataattagactgcctggaatcagccaaaagtgggtcccaagaaaatggggtaggctgggagtctctccaatcaaagtgcctggggtgcctcaggtgcctgtatcattaaaatacttgggttagttcgggaatctctcctattagaatgcctaggatcacccagttgtctctatcattagactgcctgtggtcggccggctgtctctcccactcaaatgtctggggtcacccagttgtctctatcaatagactgcctgtggtcggccggctgtttctcccactcaaatgtctggggtcacccagttgtctctatcattagactgcctgtggtcggctggctgtctctcccattcaaatgtctgggctcacccaggtgtctctatcattagacggcctggggtcagcttggagtctcttaaattagaatgcctgtggtagccttggtgtcttataaggacttatcattagactgcctgggctctgtcaggagtctttcttgttagaatgaatgaggttgtccaggtgtctttattattagactggctggcgttgaccaggagtctctccctttagaatgcctgggatcccgcaagtgtatgtaacattagactgcctgtggtcagctgggagtctctcccattagaatgcctgagatctccaagatgcctctatcattagactgtatgcggcctttcaggaatctcccattacaatgcctggggtcagccaggagctctcccattagaatgactagggttgttcaggtgtctgtatcattagactgcctgggcttggccaggagtttctcccattagaatgcctggggttgcccaattgtgtctattattagagtgtccagggtcaaccagaagtttctcccattacaatgccttggcttgccctggtttctgtttcattagaatgcctggggtcagccagaagtctctctctttagaatgcctgacgtggcccaggtgtctctatcattagtcagcttggtcagggctaggagtctttctcattagaatgcctggggtctcacaggttttgctaatattagactgcatggtgtcaggcaagaatcttttccattagaatgcctggggctggccaatagactttcacattagaatgcctggaggcactcaggtgtctctatcattagattgcctgaggttggatgcaagtttctccaattaaaatgcctggattcgcccaggtgtctctataattggactgtctgggtttggccagaattctttcccattagaatacctggggtgggctgggcacggtggctcacacctgtaatcccagaactttgggaggccaagaggggtggatcatgagttcaggagatggagaccctcctggctaacacagtgaaactccgtctctactaaaaacacagaaacattagctgggcatggtggcaagcacctgtagtcccagttactcaggaggctgaggcaggagaatggagtgaacccaggaagcagggcctgtagtgagccaagatcacaccactgccctccagcctggggaacagaacgaaactcaaaagaaaaagaaaaaaagaaaaagtaaaagaaaaagaacacctggtgtcacctaggtgtctgtatccttaaactgcctggaataggccaggagtctttcccattaaaatgcctaggttcggccaggagtttctccaattaaaatgcctggaatcaataatgtatctctatcattagactgcctgaggtcggccaggagtttctcctattagaatgcctagtgtcagctggcagtctcttccatgactgggatagccaaggtgtctctatcattagaacgtctgagttggctcagctgtctctatcattagaatgcctgaggtcagcctaaggtctctcccattatagtctctggggtcgcccatgtgactgtatcattagattgcctgcagtcagccagtggtctctcccattagaatgtctggggttgcacttgggttcagccaggtgtctctacttttagactgcctgggataggccaggatttgttcccattagaatgcttgagtatgcccaaatgtctctatcattagaatgcctgggtgttagaaatgctcattcctttgtgctgaaaagaagaactagtgctcaaagaatgttctcagcaaagcaattttactttctgcagaaagggtgctgtccatcagcaatcctgccacgagagcacaatgaacaaagaaggacaagaatatgtatcccttatgcattgggtccttactactgtgtcctatctccattggtgggagctggacctcacagtctaaactaaacccgattgactaacaacttaaactttcctaaataggtaaaggtaatggagaacaaaaggaaaagaggaagttgcttgcaaaagaacttagaaaagtaatatttccaaataaggaaggggcataagctgtgagatggaacatgcttgagcgtgtctagaacaaatatcttggttaaagtacgaagacatagaatgtacttattccctcatgtccaacagctacataggatagggtttaataaagagttcttagtattaaagcaaggaggcttgaaggaagttagtttttaaaagaaactattatttctaacatttgttatttaacaagaagggaaactttgaagaggaactttccactttccacactggggttggtggaaagtctcttccattggaatgcatggggtttcccaggtgtatctatcattagactgcctttggtctgccttgagtctcatctgtttgaatgcttggggtcaccgaggtgtctccatcattagagtgcctggccttggtcaggagtctctcccattagaacgcctggtgtcagctgtgagtctcctattatgatgcctgcaatttcccagtgtctctatcattagactgcccagggtcaagcagaagttccttccattagaatgcctgggttctcccaggtgtctctgtcattaggccacttggggttggctaggagtctctcctatgaatatgcctgaagctgcccatgtgtctctatcattagtctgcctgcggtcagacaggagtctccatattagaattactggagtcagccatgtgtctgtatcattagagtgcctgcattcggcaagaaatctttctatttagaatgcctggggtcagcctatttagaaatctttctatttagaatgcctggtctctgccataatgatgccttgggtcacccaggtgtctctatcattaaaatgcctgtgatcagctgggagtctctcccgttagaatgcctggggttcccaggaagcagagcttgcagtgagccaagatcacaccactgcactccagtctgggtgacagagcaaggctccatctcaaaaaaaaaaaaaaaaaaaaaaaaaaaaaaagaatgcctggagttgccaaggcatttctattcttagactgcccagggtctgccaggagtctctttaattagaatgcctgaagtcagccaggagtattttcacagatagcttgtttctagtttttattgtttgatattctgtttttcactataggcctcaattggctcacaaatatccctttgtagattctacaaaaaaagtgttttcaacctggtgaattgaaaaataggttacattctttgatatgaatccataacttagcattttcacagataactttttctagttactatcatgaaatattcggtttttcactgtagtcctcaatgggaaagaaatgttgattaacagattcttaaaaaagggtgtttccaacctgttgaatcaaaacaaaagttgaagtctgtgagatgactccacatatcttcaaaacatcatgacagatagcctgtttttcattcttatctctagatatgactccacacatcacaaaacatcctcacagatagcctgtttttctttcttatcactagatattttgtctttcaccataggcctcaataacctcggaaatgtcccattgtagattctacaaaagattgtttgaaacctggtgaatcaaaacacagatgtaataccatgagctgtatccacatatcacaaaccattttcacagatagtttgtttctacattttaccacagaatattcgatttttctctatagacctcattaggctaagaaatgtctcctcatagattgtgcaaaaacagcatttacaagctgaagaatcaaaacaaagattgaactctgtgagataaatccacacatcccaaagtattttcaaagatagtttgttttaaatttttattgcaggatatctggtttttcactataggcctcagtgggctcaaaactgtccctttgcaaattctacaaaaagagtgttaccaacctggtgaatcaaaacaccggttgtttcagtgagatgaatccacaaatcattaaggattttcacacatagcttgtttctagtttttaccttgggatatttggctttttactataggatttgctgggctcagaaatgtaccttcatagattctacaaaacgattgtttccaactcgtgaatcaaaacacaggttctgttcatgagataaattcacagatcataaagcattttcacagatatcttgtttcaaatttttatggtgaaatgtttgtttattcactataggactcaatgggctcagaaatgtttcctcgttgagtctacaaaaagattgtcttcaacctgttgaatcaaagcaaaggtttaacactttgagatgaatctgcatgtcaaaagctttttcaaagatagatttttttatagtttttatcccaggatatttggttttccacaatgggtctcaatgggctcagaaatgtccctttgcagattctacaaaaagagtgtttccaaagtggccaatcaaaacataggtttaaataagttagataaatctatatatcacaaagcattctcatagatagcttgtttatacttttatcatgaaatatttctttttttactgtagggctcaatgggctgtttaacaacaggtctctaaggcctcaaaaatttcccttagtagatttcactaaaatctactcccagctgtcccttagtagattttactaaaaaagcattttcaaccttttgaattataacaaaggtttaatcctgtgaaatgaatccacacatcgaaaagcattttcacagatagctagttcctagtttcattgtgggataggtagttcctagtttcatttgtctttcagtataggcctcaatgggttcagaaatttgccttcatagattccacaaaaagaatgtttttaacttggtgaattaaaacacaggttataattggtgagatgaatccacacatgactaaggatttttgaagatggcttgtttctggtttctaccttgggatatttggtttttcaatatcagcctcaccgggctcaaaaatatccattaatagatcaaaaaaaaaaaaagaaatttcccttcgtagattccacaaaaagagtgttttaacctggtgaattaaaacacatgttctaatttgtaagatgaatccacacatgactaaggatttttgcagatagcttgatagcttgtttgtggtttctaccttgggatatttgatttttcaatatcagcctcactgggctcaaagatatacattcgtagatcaaaaaaaaaaaaaaaaaaaaaagagtgtttccaacctggtgcctcaaaacaaagctttatctttgtgagataaatacacatatcaaaaacattttcacagacagcttgcttcaagtatttgttgcgggatatatggtttttcaatataggcctcagtgggctcagaaatgtacctttctagattctacaataagagtatttaaaacctgttgaatcaaaacacaggtttaaatttgttaggcaaatgcccatattaaaaagcactttcacagacagcttgctttaagtttttatcacatgatatttggttttttattattggcttcaatatgctcaaaaatattccttcatagattgtacaaaaaaagtgtttccaaccaggtgtatcaaaacagaggttccattgggtgatatgaatccacactttgcaaagtgtttttcctgatagcttgtttccatgttccttcatagtttccacaaaaagagtgattacaaacttttgaatcaaaacaaagttttagccctgtgacatgaatccacacatggcaaagcattttcaaagatagtttctttcaaatttttattgcaaaatattcggttcttcactatttgactcaatggactgagaaatgtcccttcatagattctacaaagagaatgtttccaaccttttgaatcaaaacaaaagtttaactgtgtgagatgaatccacatattgaaaagcattttcacagcatgtttctagcttttatcacaaaatattcgtgtttttactataggcctcaatgggctcagaaatctcccttcgtatagtaaaaaaaaagtttttccaacctggtgattcaaacacatgtttccttgggtgagatgaatccacacatcacaaagcactttcacagatagcttgtttctagtatttctcagagtgtattcagttttacaccacagacctcaataggctcagaaataccccttcagagattctacaaaaagagggtttccaacctgctgaattcaaagaaaggtttcactctgtgagatgaatccacacatcacaaagcagtttcacagatagcttctttctagtttttaatcacaggatatttggtttttcactataggcctcaatgggctctgaaatgtccgttcatagtttctacaaaaacagtgtttcaaacctgtagaatcaaaacaaagttttgatgatgtgagatgaatccacacatcacaaagccttttcacagatagcttgtttctattttttatcaccagatattccctctaggccttaatcagctcagaaaggttttctcagagattctataaaaggagtgtttcctacctgttgaattaaaacaaagttttaactatgtgagataaatccacatattgtaaagcattattacagatagcttgtttctagcttttatctcaggatatttggtttttcacaataagcctcagtgggctcataaatcttcctttgtagattctacaaaaaacagtttccaacctagtgaactaaaacaaaggtttaactttgtgaaatggatctatatatcatgaagcattttcatagatatctttctcctagtttttatcatgggatatttggtttttcactaaaagcctcaatgggctcagaaatgtccttttgtagattgtacaaaaagagtttttccaacctgttgaatcaaaacacaggtttaagtctgtgagataaatccacacattgcaaaatattttcacagacaggttgtttgtagtttttatttgcggacttttttttttaactgtaggcctaaatgggcttagaaatgtttttttttcatagattctgcaaaaagagtttttgcagcctgttgaatgaaaaaagttttaaatctgtgacataaatccacacatttcaaagcattttacaggtagcttgttactggtttttatcatgggaaattcagtttttcactacatgcctttatgggctaagaaatgtttcttcttcatttccacagaaatagtgttaacgacctggtgaatcaaaatacagtttccactcgatgagatgaatctacacataacaaatcattttcacagatagcttgtttctagtttttttttttttttatcagatattcggtttttcactataagcctcaatgggctcagaaatgtctcttcatagattctacaaaaagagtgtttccaacctggtgaatcaaaacacaggtctcattcagtgagatgaattcatacatcacaaagcattttcacacatagcttatttttggttttcatcacaaaatattttgtctttcactatatactttaaagtgttcagaaatgtcccattttagattctaccaaagaagtgtttccaacattttgaaccaaaacaaacatttatcttcctgagatgaatccacatattgcaaaacattttcacagatagtttaataacagttttcatctcgggatattctgtttttcactctaagcttcaatgggttcagaaatgtccctttgtaaattctacaaaaagagtattttcaaggttttcagtaaacacaaaggtttaactctgtgagatgaatcccaactttgcatagcattttcacaaatagcttatttcttgtttttatcacaagactttcagttttttactattggcatcaatgggctcagaaatgtccctttgtagcttctataaagagggcttccaacctgttgaaaaaaaagtttaactctgtgaaataaatccacacatcaataagcgttttcatggatattttgtttctagtttctatcatgggatatttgatttatcacaatagacctcaatcagctgagaaatgtccccgcctagtttcgacaataagagtatttttaacaggttgaattaaaacaaaggtttaacgctgtgagatgaatttacacatcacaaagcattttcacagatagcttcttcctagtttctattttgtgatattcagtttctcactacaggcctcagtgggttaaggaatgtcactttgttgtttccagagaaagagtgtttttaaccccttgaatcaaagcgaaggtttaactctgtgagatgaatctacaaatcagaaagggttttcacacgtagcttgtttctagtttttatccggggatatttggtttttcacaataggcctcaacgaactcagaaatgtccctttgtagattctacaagaagaggacttctaatttggtaaatccaaactcaggttccatttggtgagatgcatttacacatcacaaaacattttcacagatatcttgtttctagtttttatcatggcatattcggttttatattgtaggcctcaatagactcagaaatattttttcacagattctacagaaaaagtgtttactaactgttgaattaaaacaaaggttcaacactgtgagatggatctgcacatggcaaaacatttttacagttagcttgtttctaatttttaatgaggaatattcagtttttcactgtaggcctcaaaggactcagaaatatcccttcgtgaattctacaaaaaaagggtttccaatctggtgaataaaaataacagtgtgacttggtgaggtaaatgcacacatcaaaaagtatttttgcagatagcttgttcccacttttcatcacaggatatttggattttcctgtaggcctcattgcgctcagaaatgtccctttatagagtgtacaataaaagtgtttccagcctgatgaatcaaaacacaggttccattcagtgacatgaatctacacatcagaaagtattttcaccaataatttgtttctagttttcattgcaaaatattctgtttttcagtactggcatcaatggtctcaaaaatgtcccttcattgatcctacaaaaaaagtgtttccaatctggtgaatcaaaaccatggtttaactcttttagataaatccatgcatcacaaagcatttttacaaatagcttgtttctcttttttattgtgtgatattcagttttttactcttggcctcaatcttcttagaaattctcctttgtgttttctataaaaaactggttccaatgtcgttattcaaaacacaggagccaatctgtgagatgaatgctcacatcatgaaacattttcacagagagagtttcttcctagttttccatatggagtattaagattttcactcttgtccttagtgggctcagaaatgtcccttcctatattctacaaaaaaaagtgtagccaacatgttgaatcaaaaaagagcttaagctctgtgagatgaatatgcacaccacaaagcatattcagaggtagtatatttttagtttttgccatgggtattcaggttttcactataggccttcatgggttcagaaatgtcccttcatagattctacaagaagagtgtttccaacctagtgaatccaaaagtggcttaaatctgtgagaataatatatatatggaaaagcattttcacagacagcttgtttctagtttttatcatgggatattcagtttttctgtataggcctcaatgggttcagaaatatttcctcatggattctataggaagaatgtttccaaactgttgaattaaaagaaaggtttaagtctgtgagattaattgatgcatcagaattcattttcacagatagcttgtttccactttttatcataagaaattcagtttttcaatattggcctcaattggctcagaaatattttctcttacattccacaggaagcatgtttccaacctgatgaataaaaatacaagttccattccttgaaataaatccacacttcagaaagcattttcacagagggcttgtttctagtgtttatcacaagacattcagtttttcactataggccaaaatgggctcagaaatgtttcttcatagagtctacaaaaagagtgcttctaatctgttgaattaaaacaccggttccattcggtgtgatgaacttgcacatcacaaagcagtttggcagatatcttgtttctagtttttattgcaggacatttgggttttttaataggcttcaatgtgcttagaaatgtccctttgtagattctacaaaaagagtgtttcaagcctggtgaatcaaaacatgagttccattcggtgagatgaatgcacatcagaaagtattttcccagataccttgtttttagttttcatcgtggttccaactggttgaatcaagaaagaggtttaactctgtgagattaatccacacgtcaccaagcattttcacagatagcttgtttagagattgtgtagcagaatatttgatttttttcctatagtcctcaatgcggtaagaaattgtccctttgtagattctacaaaaagagtgtttccaaccagataagtcaaaacacaggttttattcattgagatgaatccacacgtctgaaagcatattcacagatattttgtttctagtttttatcacaaaatattttgttttttactataggcatttatgacctcaataatgtcccttcatgggttctacaaaaagtgtttctaacttgttgaatcaaaacgaaggtttaactctgtgaaatgaatctacacacaaatccttttcacagatagcttgtttctagtttatatcatgggatatttggtttttcactatagccctccacgggctcaggattgtcccttagtagaatccacaaaaaagtgtttccaactttttgaatcaaaaaaaggtttgactctgtgagatgatttcacacatcgtaaagcattttcacaggtagcttatttctagtttttatcgcaggtattctgtttttcactatgggcctcaatgggctcagaaatattccttcatagattctacaaaaagagcatttccaaccaggtgaatcaaaacaatggtttaagtcttttagatgaatccacatatcccaaataattttcactaatagctcattactggtttttaatcatgaaatattcatattcattttttcactataggcctgaatttgctcagaaatttttttttgtggatttgattgcaaagtgtttccaacctcatgaatcaaaacacaaaatcctatgggcctcaatgagctcagaaatgtccctttgtagattctacaaaaagagtgtttccaaccaggtgaatcaaaacaatggtttaagacttttagatgaatccatacatggcaaagcatttttacagatagcttgtttctagtttttatcaggggatattcagttttttactaaaggactcaatgggttcagaaatgtgccttcatagatcctacaagaacagtatttccaatctggtgaattaaaacacacgttcccctccgtgagttgaatctacgtatctcaaatcatattcactgataacttgtctctagtttttatcacaggagattttattttttactgtaggcctccatgacctgagtaatgacccctcatagagtctacagaagagtctttcccacctgtgaatcaaaacgaaggtttaactctaattcacacatggcaaagcattttcacagattgcttgtttctagttattagcacaagaaattttgtttttcactattggcctccatgcactcagaaatgttttttcatagattcttcaaaaagagtgttaaccttttaaattaaaaaaaaaagttttgtctctgtgagattattccacacatcacaaagcattttcacagttagcttttttaaccataggcctcaaagaacccagaaatgttgcccaggtgtctctatcattagactgcctggggccaaccagggaggggtctctcccattagaatgtctggggttgcacaggtgtttctatcattagattgtctagggttgcccaggagtctctccaattagaatgcatgtgtttggctgggtgtctctcacattagcatgcctggggtttgctgagagtctctctcattagaatgcctgtggttgagtggagcctctttcattaaaatgcctgaggtcagatggaagtctcacttattagagtgtttgagatcacctgggtgtctctattataatgcctgtggttgccttggagtctttccgattaaaatgcctggggtcgccctggtgtctctaccattagacagcctgggttcaaccaggaacctctctcattagaatgcctggtgtcaccaagatgtctttatcattagactgcctgggttcagccagtagtctctccctttagaatgcctgggttccgcaatgagtttcttccattaaaatgcctgtagttgataggtgtcccgattattagacggcctgaattcggccaggagtctcttccattaaaatgtctggggtcacccaggtgtctccagaattagactacttgtgcttggccagaaatctctcccattagaatgcatagtgttgccctggtgtctctatcagtagactgccaggggttggccagttgtctctttaattagaacgtctgatgttgcccaggtgactctattattagactgcctgtggtcagctgggagtctctcccattagtacacctgggatctcccgagtgtctctgtcattagactgcctgggttcagtggttgtctctttcattagaatgccaggggttgcccagttttctctattatcagaatacctgtgatcagccagaagtctctcccattaaaacgtctgagttcgcccaggtgtctctattattagaatgcctggagtcagccaggtgcctattccattagaatgcttggtgttgcccatgggtttgtatctttagaaaacctgggttcagccaagtgtttgccccataagaatgactgcagttggctggatatggtgactcatgcctgtaatcccagcacttttggagaccaagccaggaggatcccgaggtcaagagatggagaccatcctggccaacatggtgaaaccccatctctactaaaaatacaaaaattacctgggtgttgtggtgcatgcctgtagtcccagctactagggaggctgaggtaagagaatcacttgaacctgggaggcagaggttgcaatgagctgagatcatgccactgcactccagcctggtgacagagccagaatcaaaaaaacgaaaagacaaagaaaaaaacaaaacaatggctgcaatcacataggtgtcactatcattagacttcctggagacagtcaagagtatctcccattagaatgcctggggtcagcagggattgtctcctattagaatgcctgtggttgcccaggtgcctctatcattagactgcctggggtcggctggggcactctcttgtaataatgtgtggggtcgtgcagttgtctctatcattaaaatgcctgggtcccccagttgtctctatcattagaatgcctgctgtctgccaggagtctcattcattagaatgcctgggatcacccaggtttttcctttattagacagaattggccaggagtttctccaattaaaatgtctggcattgcccatatgtctctatcattatactacctggggtcatccaggattctctgccattagaatgtctgcgtttggccaggagtctctcacattagaatgcctttggttgccctggtgtctctatcattagaatgtctttggagggacaggagtctctgccattagaatgcctgtggttgttcagatgactctaactttagacagcctgccgttggccaggagtctctcccattagaatgcctaggctggatccaagtctttcccatttgaatgtggggttgccctgatatttttattattagactgcctggtgtcaaccgggagtctctcccatcagaatccctaaggtctcccagatgtccttattattagaatgcctggaagtgacaaaaagtctcacacattagaatgcctgaagtcgcccaggtgtctgtattataagactgcatgaggttgacgcagagtctctcccattagaatgcttggggtggcccaggtgtctctatcattagtatacctggggtcagccaggagtctttcccatgagaatgtctggggttgcctagatgtcgttatcataagactacagtgcctgtggttgttgaggtgtctctattattagaaagcctggcatcagccgggagtctctccctgtagaatgcctgaggttactcaggtgtctctattattagactgtctggggttagccaggagtctctcccatcagaatgcctaggtcacccagatgtctctatcataagactccctgaggtcagccaagagtctcttccattataatgcctgtggttgcccaagtgtctccatctttatactacctgcaatcagctgggagtctctccagttaaaatgtgtggggtctcccagggtatccatcattagaatgcctggggctggccagaagtctctcccattaaaatgcctggggtccaccaggtgtctctattatttgactgcctgtggtcggcccagagtcctccatgtgcaaagcctgggatcacccaggtgtttctatcattacattacctggatttggttgccagtctctcccattagaatgcttgtggtcacccaggtgcctctaacattagactgcctggtgttggctaagagtctgttccattaaaatgccttatgttgcccatgtgtctctataattagatggcctgaaagcagtgggagtctctcccattagaatgtctggggtcgcctaggagtctttttcattagactgcctggggtcaactaggagtgtctctcatcaaaatgcctggggtggccctgatgtctctatagagtgcattttgtcggcgaggagtctctgccattaaaatgcctgtggtcggtcaggtgactctaacctgagagttcctgcggttcaccaaaagtctctattattagaatgcctggggtggatcagcagtctcgtccattagaacgaggggttgccctggtgtctctattattagactgcctggcatctgacaggagtctctctcactagaatgcctggggccgcctagggctctctataattaggctgcctggagtcggcagaaagtctctcttagtagaatgtctggagtaggcctagagtctctcccattagaatgcctgtggtcgctcaggtgtctctatcatttgaatgcctagggtagactgggattttgtcacattagaatgcctacagtcgctcagctgtctctatcattagactgcctgcagtctgccagaattctcttgtattataaagcctgaggtcactgaagtttgtctatcattagactgcctggtgcaggccatgaatctctcccattagaatgcctggggttgccctgttgcctctaaccttggactgcctggggtcggccatgagtctctcccattaaaattcctggagtctattggagtttcttccattagaatgcctggggttgccaaggtgtctctatgattacactttctgggatttgcctggtatctctccacttagaatgtttgaggtcacccaggtgtctctataattatactgcctagagtcagccaagggtctctcccaagagaatgcctggggtcgcccggtagtctctttcattagaatggctgtgatcaccaaggtgcctttattttttacaatgcctggggttggccacgaatctccccaattagaatgcctgagtttggctgagagtctcccctattaggatgcatcacgttgcccagatgtctctataattttattgcctggggttggccaggagtatctcccattagaatgcctgggatcgcccagttgtctttatcattagactgactgaggttggccgaaagtcactcctgttaaaatggctggattcgcccaggtgtctctatcatttgactgcctggtgttggccaggagcctctcccactagaatgccttgggtcacttaggtgtttctataattagaatgccattggtctggcagaagtctctgccattagaatgcctgtggtcgcccaggagaacctaacctttgactgcctacataaaccaggagtctcttcaatcaaaatgtgtggggtaggtctggagtctcttccattagaatgcagggacacccttgtgtctctatcattggattgcctgtggttgggcgggagtctctcccattagaatgcctggggtcacccaggtgtgtctatcattagacagccttgggttggcaagaagtctctctcattacaatgtctggggtcgccccagtatctctatcattagactgcgtggggtcagcagggtgtctcccccattagaatgcctgatgtcaccaaggtgtctctatcattagactgcctggggtcagatgaaggcttcactagaatgcctggggtttggctgggagtatctcccattagaatgcctgctgtcacccaggtgtttctatgattagaatgcctggaatcggtggggagtctcttttattagaatgcctggggtcacctaggtgtctctatcattaagctgcctgcagtcggcaggcagtctcttttgttggaacacctggaatcgccctgttgtctccatcattagactgtctggggttggccaggagtctctcccattggaatgtttcaggtcagccaggagtctttttcattagaatgcctagggtggcccagttgtctctatcattagactgcctggattcggccgtgagtctctctcattagaatgcctggcatcacccaggtgcctctatcattagactgcctgcgtttggccaggatttgctcccgttagaatgcccgggatatcaaaattgtctctttcattagactgccttgggttggctgggagttcctcccattaaaattcccggggtcgccaaagtgtctttatcattaggctgcctggcgtaagccaggagtctctcccatgagaatacctggtgtcgccgggtgtctctacccttagactgcctgaattcggacacttgtttctatccttagactgcctggggtctgcaaggagtctctccccttagaatgcctgggttcgcccatgtgtctctataattagaatgcctggttcctgtgggagtctctcccattagaatgccttgggccgcccaggtgcctttatcagtagactgtgtggggttgaccaggtgtctctcccattagatttcctaaggctgttcagttttctctaacattagacatcctggagtccaccaggggtctctgccattagaatgccagtggtcgcccaggagactttatcctttgactgcctgtggtcggccagggggtgtctctgattagagtgcctgctgtgggtcaggaatctcttattagtatgttctttcacccagttgcctctgccattagactgcctggggtcagtcagcagtctctcccattagaatgcctgcagttgtccataagtctctatcagtagaatgtctggggtcagccgtgagtctctcccattacaatgcttgtggtcacccaggtacctctatcattagactgcctgtgatcagccaggagtctctccaattaaaatgcatggggtctcctaggatctccattattagaatgcctgaggtcgcccaggtatttctatcattagaatacctcatgtctgccaggagtctttctgattagaattcctcgggtggctcaggtatctttctcattaaaatgcctggggtcagccaaatgtctctcacattagaatgcctggggtcgataacgtgtatctatcattagaatgtctggggtcggctgggagtcttgcccagtaaaaagcctggggtcacccaggtgtttctattattagactgcctgggttcagctgcaagtctctcccattaaaatgcttggggtcgctcaggtgtctcttcattagactgcctggtgttgaccagaaatctgtatcattaaaatgtctcaggtcgtccatgtgtctttataattagactgacagaagttggcaagagttcctcccgttagaatgcctggcatcaccaaggattctctattattagacttcctggggtaggccaggactgtctcctaatagaatgcctgaggttacccaggtgtctttataattagagtgcatttcatcagcaaggactctctgccattataatacctgtgtttacccaggtgactctcacttgagagtgcctggagttggccaaaagtctgtctcattagaatgcctagggtgggtcagtagtctctttcattagaatgtggggtcgcccaggtatctctatcattaaactgcctggggttggctgggaatctcttccattagaatgcctggggtcacccaggtgtctctataattagactgcctggggtcagccaggagtctctcccaaaagagtgccttgggtcagccgagagtctctcatattagaatgcctgggtttgccaagatgtctctattattagaatgcctgggtttggccagaattctctcctattaagatacctggggtcacccaggtgcctctatcatcattagactgccaggagtcagccaaaagtctgtcttattagagtgcttggggtcacccaagtgcctctataattagacgacatggtgtcagctaggtgcctttcccattaaaatgcctggtgttgcccgactgtctctattttttgactgcctggggtaggctgggagtctccacagtagaaagcctgtggttgacagggagtcttcttagaatgcctgagttcctgtaggtgtctttatcattagactgccttgggtcagccgaaattatctccaattaaaacgcctgggttcgcccaggcgtctctataattagactgcctgggatcatccaggagtctctaagagaatgcctggagcggcccaggtgtctctatctttaaagtgcctggtgtcagccaggagtgtctctcatgagattgcctagtgtccattggaagtttctcttatcaaaatgccttatgtcgtccaggtgtctctatcattagaatgcctatggttggcatggagtctctccccttaaaatgtctgtggttggccaggtttctctattattagtctggctaaaaccggccatgtgtatcttacattagcatgcctgggtcacccagatgtcgctatttttagactccctcggttcagctgggaatgtctcccaatacaatgcctgcagtcgcccaggtttctctataattagaatgactttggtcagccaagagtctctaccattagaatgtctgtggtcccccgggtgactctaaccttagactgcctgcagtcagccagggtctcttccattagaatgcccaaagtgggtcaggagtctctcctattagaatgcggggttgccctggtgtccctatcattagactttatggaatcggctggaaagtctctctctttagaattcctgggttcatccaggtgtctctatcattagatggcctggcatcagccgggaatctctcctattagaatgtctgaagttgcccaagtatctatttttagactgcctgtgttcagccaggagtctttcccattaaaatgtctggagtcgcccaggtgtctctatcattagactgtccgggtttggccaccagtctctcccattagaatgcttgggatcacccatgtgtctctattattgaactatctggtgtcagctggaattctttccattaaaatgccttgggtctcccatgtgtctctataattaaactggcagaagtcagtgggagtttctcccgttagaatgcctggggtcgcccaggagtctctattattagactgcctgaggtaggccaggactgtctcccagtagaatgcctggggtcacccaggtgtctttataattagagtgtatttggtcatcgaggagtctctgccagtagaatgcttgtttgcccaggtgactctaacctgagagtgcctgcagtaggcaaaagttatctctcattagaatgctggggtggatcaggagtctcttccattagaatgtggggttgcccaagtgtctctatcattaaaccacctggggttggccaggagtctttcccattagaatgcctggggtcacccagttgtctctataattagactgcctgggatcaggcaggattctctcctgagaggatgccttgtgtctgccgggaatctctcatattagaatgtatggattcgccaaaatgtatctattgttagaatgcctggagtcgtctgggattctatcctattaagacgtctgggtcgcccaggtgtctctatcattagactgccatggttcagctgagagtctctcttattagaatgtctggggcaacccaagagtctctaaaattagcctgcctgttgtcggccagatgtctttcccattaaaatgcctggtgttacctgagtgtctctatttttagactgcctggggtcagctgggtctctcccattagaatgcctggggtcaacaaggtgtcttcatcattagactgccgggggcaagctgggagtctcctttattaaaatgcctgagttgcccagatgtctctacaattaaactgctcaattttgtccctgggtgctcgagactggagaatggcgatgacttttaccaagcatacttcctgcaaacacatttttaacaaagcacatcctgcacagccctaaatccattaaaccttgagtcaacacagcacatgtttctgtgagcacatggttggggctagggttacagattaacagcatctcaagaaagaagaatttttcttagtacagaacaaaatggagtttcttacgccttcttctttctacatagacacagtaacagtctgatctctctttctttcccccacagtgtcttccattagaatgcctaaagtcacgcaactgtctctatccttagactgcctgggttcagtcaggagtctctcacattaaaatgcttccctttagaatgctcaaaattggccaggagaatctcccattaaaatgcctggagtcaccctggtgtctctatcattagaatgcctgggttcagccaggaatctctcccattagaattcctggggtcacccatgtgtctctataattagactgcctgggtaggcaaggagtctctcctgttagaatgccttgggtcagcctaaagtctctttcattagaatgactgtgatcgttcaggtgtctctataatttgaccacctgtggttggtcagggactttccctattaaaatgcctgaagtcaactaggtgtctccattattagacagcccgaggtcggccaggaatctctcccattagaatgcctgaagtcagccaggaggttttgtttgtttttatttttgcttttatggagtctcactgtcttcagtctggaatgcaatggcatgatctcggctcactgcaaactccacctccagggttcactctcccgagtagctgggactacaggcacaggccaccacacccagctaatttttgtatttctagtagagacaggttttcaccatgttggccaggatggtatcaatctcttgcactcgtgatccacccctctcagcctccaaaagtgctgagattacaggcatgggccactgcgcccagccaggagtctgtttgtttagattgccttgggttgcccagttgtctctgtcactagcctgctggtctcggccgagagtctctcccattatagagacgttaatgtgtctctataattagactgccttgggcccgcttggtgtctctcacattagaatgcctcgggtctcccaggtgtctctgtcattagcctccctggggtcggtgaggaatctctcatattagaatgcttgggctcccaaaggtgtctctgtaagactactgtcagccaggagtctctcccattagaatgcctggggtcacttgggattctctcccattaaattacctgtggtggctcaggtgtctctatcattagaatgcctcgggttggctggaagtctctaccattttaaggcctggggtcgccaaggtgtctccatcattagaatacctggagtcgataaggagtctctcccattagaatgcctagagtgtgccaggagtctctcccattaaaatgcctgaggtcgcccaggtgtctctatcattagactgcctggggtcaaccaggagtctctcccattagaatgcctgtggtccatcaggtgtcgctatcattagagtgcctttgttcagcaggaagtctctctccttagaattcctggggttgtaatccaagcactttgggaggccgagggcagtggatcacctgacgtcaggagatcaagagcagcctggctaacatggtgaaaccctgtctctactaaaaatacaaaaattagttggatgcagtggcacacatcattaatcccagctacttggggggctgaggcaaaagaatcacttgaacccagaaaatggaagttgcagtgagttgagattgtgtcactctattttagcttctgtgacaaaatgagactctgtctcaaaaaaaaaaaatgcctgaggtcggcctggagtctctccaataatgatgcctggggtcgcccaggtgtctctatcacaataaagcctggggtcgaccgggagtctctcgtgttagaatgtctggagttgcggaggtgtctctatcattacaatgcctgggctcagccaggagtctctcccattagaatgcctgaagtcacccaagtgtctctatccttagactgcctgaggtgggccaaaggtctctcccattagaatgcctggattggcctggagtattttcacagatagattgtttctagtttttcttgaggaatattcagtttctcacaatagacctcaatgtgctcagaaatgtcccttcacagattctacaaagcagtgcttttagcccattgaatcaaaacacaggttccattcggtgagatgaatccacacattacaaagcattttcacgtgtagcttgtttctaattttcatcgtgggaaatttggtttttcactaaaggctgcaatgggctcagaaatgtcttttcataggttctacaaaaagagtgtttacaatgtgttgaatgaaaacataggtttaactctatgagatgaatccacacatcacaaagcattttcacagaaaatttctttttagtttttatcgtgagatatttgtttctttactataggattcaaagggctcagaaatgtctttttgtatattctacaaaaaaagtgttttcaaactgttgaatcaaaacaaaggattaactctgtgacatgaatccacacatcataaaacgtttccacagatagcttgtttccagtttgtattgtgagatacccatttttccaaatatgcctcagtgagctcagaaatgtttcttcatagattctacaaaaaaagtttccaacctgttgaattaaaacaaagttttaagcctttgatatgaatccacacattgcaaaacgttttcacagatagctgctttctagtttttatcacgggatattagctttttcacaataggtttcaatgggctcagaaatgtcccttcgtagattctacaaaaaaagtttccaatctgtggaattaaaacagttttaactctgtgcattaaatctacacatcggaaattattttcacagatatcttgtttctaaattttaggtgggatattttgttattcactataagccttaatgagctcagaaacgtccctttgtaaattctacaaaaaaaaaagcttttccaaggtgttgaataaaaacaaaagtttaattttgagagctgaattaacatattacaaaacgttttcacggatagtttgtttctagtttatattgtagaaaatttaattttttactataagcatcaacgggttcagaaatatccatttctagatactacaaaaagagtgatttcaacgttttaaatcaaaacaaaggttttactctgtgatatgaaaccacacatcacaaacattttcccagatagtttgtttctagtttttatcatgggatattccgttttttactaaagacctcaatgggctcaggactgtccctaagtagattttacaggaagagtgttttgaacctgttgaaacaaaacaaaggttaacgtctgtgagatgaatccacacatcacaaagcattttcacagaaaccctgtttctggtttttatcacaggaaatttggtttttcatgataggtttaaaaggacaaagaaacgtactgtcatagattctgctaaaaaagtcgttccaacctgttgaatcaaaacataggttaaatgctgtgagataaatccacatataccaaagcattttcaaagatagcttgtttctaatttttatcacagaatatttggtttttcacagtaggcctcaatgggctcagaaatgtacctctgtagattctacaaaaagtgtttccaaccttgtgaatcaaaacacaggtgccattcagttagatgaatgcacacatcacaaaacattttcacatacagcttgtctctagtttttattgtgggatattagtttcttactataggtctcaaaaagctaagaaatttctatttgtagattctaaaaaatagtgtttccaatgtgttgaataaaaacaatggtttaactttgtgagatgaatctatacatcacaaagtattttcacagataggttgtttcaagtttttaccatgggataattgatttttcacaataggcctcaatgggctctgaaatgtcccttcgtagattctacaaaaagtgtgtttccaactgggtgaatcaaaatacaggttccatttggtgagatgaatccacacatcacaaacattccacacgtatcttgtttctagtttctatttcaggatatgtggtttttcactatacttctcaatgagctcagaaatgttttttcatagattctacagagagagtgtttccaacatgttgaatcaaaacaatggtttaactttgtgagataaacccacacatcacaaagcattttcacacatagctggtttccagcgtttgttcaagaaattcagtttttcactgtaggccacaatgggctcagatatgtctctttttagaccttttattttccacaaaaagagagtttccaacctgatgaatcaatacaaagattcatctctgtgagatgaatcacatttctcaaagcatttccatatttaggttgtttctagtttttaccacaggatcctttgtttttcaatacaggcctcgatgggctcataaatgttccttcatagattctacaaatagaaggtttcagtcctgatgatttacaatgcaggtttaattcagtgagaagaatccacacatcataaaactttttcacagcgtatttctagtttttatcattggatagtcggtttgtcactgtagacttcaatgagttcagaaatatcccttcatagattctacaaaaatagtgtttccagcatcttgaatcaaaatgcatttttcattcagtgagataaatacagacatcaaaaaacattttcacagaaagcttgtttctaatttttgtcaggggatattctgtttttcactaagtctcaacgggcttcgatatgtcccatcatagatacttcaaaaattgtgttttcaacctgttgaatcaaaacaaatgttgaactctctgacatgaaacctcacatggcaaagcatgtttacacataccatgtttctagcttttatcatacaattttttattttttcactgtatgcaccatgggctcagaaatgtctttttgtagtttctacaaaaagagtgtttccaatctgttgataaaagcaaaagtttaactatgtgagatgaatccacacatcacagagcattgtcacagatagcttgtttctagttattatgggttatccagtttttcactctaggctacaataagttaagaagtgttttttcatagattttacaaggaatatgattccaacattttgaatcaaaacaaaggtttcattctgtgagataaatccgtataccacaaagtatttttataaatagcttctttctagttttagttgtgtgatatttgggttttcacactaggcctcaatgggctaagaaatgttccttcatagattttacaaagaacctggttttaacctgttgaatcaaaataaaggtttaactctgtgagaaatatccacccttcacgaagcattttcatgtatagtttctttctagtttcatggtggaatattcagtttttcagtataggtttcaaaggctcagaaatttctctttgtagttctataaaaagagtattttcaatttgttgaatcaaaacataggtttaactctgtgagataaatccactcatcacaaaacattttcacgtatagcttgtttctagtttatattgcagtatatttgttttttcactataggccttaatggtctttgaaattgtcccttcatatattctacactaagagtatttccaacctgttgaatcaaaacaaagattttactctgagataactccacccatcacaaagcattttcatacatacctagtttccagtttttatttcaggatattcggttttactctataaaccagaataagctcagaaatgtcttttcatagattctacaaaaagaatgctttcaacctgttgaataaaacaaaggtttaacttcatgagatgaatccacctaatgcaaagcattttcacagatagcttgtttctagttcttaccatgagataatcaatttaatataggcctcaacgggcttagaaatatcctttggtagattccacaaaaagagtttttccaaccagctgaatcaaaacacaggttccatgtggtgagatgaatccaaagatcacaaatcgttttcacaggtaggttgtttctagtttttatcacagaatattctgttgttcactataggcctcgatggcctcggaaatgtcccttcatagattctaaaaaaaagtgtttccaacccagtgaatcacaacacaagatccattcagtgagaagaatccccatataacaaagcattttcacagagagcttgtttgtactttgcatagcgggatattcagtttctcaccttacatctcgataagctcaaaaacgtctcttcatagattctacataaagaatgttttcaaccagttgaatcaaatcaaaaatttaacactgtgagataaatccacaaatcaaaaagcattttcataggtagtttgtttctactacctatttatcaggggatgcttggtttttcactacaagtctcaatgggctcagaaatgatgtcccttcatagattctaaaaaaaaaaaaaaaaaaaaaaaaaaaagagtgtttaccacctgttgaatcaaaattaaaattttactctatgagataaatctacaccttgcaatgcattttcattgatagattctttttagtttatatcatgagatatttgattttttactacaggcctcaatggtctcggaaacatccctttgtagattctacaaagaaaggatttccaacctgttaagtcaaaacaaagatttaactctgtgagataaaaccatgcatcgcaaagcatttcacagatagcttgttcctagttcttttcgtggaatattcattttttcactatagccctcaataagcttagaaatgttcctttgtagattttacaaaaaagtgatttcagtctaacgaattagaacaaggctttaactcagtgagacaaatccagatgttaaaaagcattttctcagatagcttgtttctagttttataatgggatatttcatttttcactataggcctcaatggtctcataaatatccctttgtagattctacaataagagtgtttccaacttgttgaaccaaaacacaggtttgattcggtgagacaaattcacagctttcaaagtattttcacagaaagcttgtttctagtttctatagtgcaatattcgagttttcacagtaagcctcaatgggctcagaaatgactcttcattgatcctacaaaaagagtctatccaacttgaatcaaaacgcaggtttcattcagtgggataaatccacacatcacaaaacatattcgcagataacttgtttctactttttatcgtgggatattcagatcttcactataggccttcatgcactcagtaatgtctcttctagattctaaaaaagaatgtttccaacttgcttaatcaaaaccaaggtttaactctgtgtgatgaatccacacatcacaaagcgttttaattgataacttgtttttagtttaaatatttgaattttcactataggcctcaatagactcagaaatgtctctttgtagattctatatagagtgttttcaacctgttgaataaaaaaaaagtttaactctgtgagataaatccacacattgcaaagcattttcacagagagcttgtttttagtttgtgtcacagaatattcactttttcactatagacctcaaagggctcaaaaatgtttcttcatagattgtaaataaaagtgtttcaaacctagtgaatcaaaacacaggttttatttagtcaaatgaattaatacattacaaagcattttcacagatagcttctttcttgtttttaacatgggatattttgtttttcactaaaggcctcaatggtctcagaaatgtccctttctagattctacaaaaggagtgtttccaacctcttgaatgaaaataaaggtttcactctgtgagataaatccacacattgcaaagcattttcacgtatacctagtttctagtttttatcacaaaatatttggttattctctataaacatgaataagctcagaaatgtctttttgtagattctacaaaaagaacgttttcaatctgttgaattaaaacaatggcttacctctgtaagatgaatccacacaaggcaaagcattttcacagatagcttacttctagtgtttatcacaggataatagatttttttactatagatcctcaatgggctcagaaatatcctttcatagattctacaaaaagagtgttttccacactaaatcaaaactcatctttaatttggtgaggtgaatccaaataacacaatgcattttcacagatggcttgtttctagtttttatcatggaatactcagtttttcactataggcttcagtggcctcagacatgtccctttataggttctagaaaaagagtgtttccagtctggtgtatcacaactcaggtgccactcagtgagaagagtccacatatcacaaagcattttcacagatagcctgtttctacttttcagagcaggatattcagctgcttactataggcctgaagaactgcagaaatgtccctctgtagattttactaaaagagtgtttccaaccagcttaatgcaaacaaaaatttaacactgtaatataaatcctcaaattaccgagcatcttctctgatagctcgtttctagtatttatcgtggaatatttggttttttactatagggcttaattggctcggaaaagttccttcatagattctgaaagaagtgtatttctaactgttgaatcaaaaccaaggtttaactctatgagatgaatcaacacatcacaaagcattttcacatagtttgcttctagtttttatcaagggatattcatttttttgctataagcctagatagcatcagaaatgttcctttgtagattctacaaaaagcctgtttcaaactgttgaatcaaaataaaagtttaactctgtgagatgtatccacaggttgcaaagcatgttaacagatgcttctttctattttttatcacaggatattcagtttattactataggcctcaatgggctcaaaaatgtcacttcgtagattctacaaaataagtgtttccaatctgttatatcaaaacaaagttttatctctatgagatgaatccacacttagcaatgcattttcatagatagcttctttttagtttatatcgtgagatattcaattttttaatatagtcctcaatgggctcagatacatccctttgtagattctacaaaaaagtgttttcaacctgttgaatcaaaacaaagctttaaccctgtaagatgaatccacacatcacaaatagctcagatcacatcacagatagcttgtttctagtttttattgcagaatatttgttattttactataggcctcaacaggctcagaaatggttttttgtagattctacaaaaatcctgtttccaacctgatgattgaaaagaaaggtttacttctgtgagataaatccagacattggaaagtattttcacaggtagcttgtttcttgtttttattgtgggatattcaggttttcactatagacctcattgggctcagaaatgtcccttcatagattctacaaaaagagtgtttctaactttttgagtcaaaacacaggtttgatttggtgagatgaatccacaaatagcaaagtattttcatataaaacttgtttctagtttttatcgcaggatttttttattacaggccttaatgggctcagaaatgtctctttgtagattctataaaaaagtgtttcccatctgttgaatcaaaacagaggtttaacactgtgaggttaatccacacatcacaaagcattttcacagatagcttgtttctagtttttatagggcaatgttcaattttttactgtagtcctcaatgggctcagaaatgtccctttgtagattttacaaaaagagtgtttctaacttggtgagtcaaaacacagtttccattctgtgagataaatccacacatcacaaagcatattcccagatttttttccttctttttatcacaggatattaggtttttcactatatgggctcagtgatgtcccttctcaattatacaaaattgagtgtttccaatcagttgaataaaaacaaaggtttaaacctgtgagatgaatcctcacatctcaaagcattttaactgagaggctgtttttagtttttatcgtggcatactctgtttttcactatgcacctcaatgggctcagaaatccctttatagattttataaaaagtatattaccaatcttttgaatcaaaatagaggttctactctgtgagatgaatccacacatggcaaaaaattttcacagattgcttgtttctagtttttgtcatgggatattccatttttcagtataggtcttaatgagtttagaaatgtaaccttgtagattctacaaaaaaagtgtttccataatgttaaatgaacaaggaagtttaactttgtcagataaatctacacatctcaaaccattttcacagatagtttgtttgtagtttttatcataagatatttgtttttttactataggcctcaataggttccaaaatgtccatttgtaggttctacaaaactagtgtgtcctgttgaatcaaaacagaggtttaactctgtgatatgaatctacatatcacaaagcattttctcagttagctttttttctagtttttataacacgtctatttcattagaattcctgggatcacccaggtgtttctttcattagacatgctggggtgggccaggggtctctctcattagaatgtctggggtggccctggtttctctatcattagagtgcctggggtcagccaagtatctctcccattagaatgcctaggcttaacaaaatgtttttatcattagactgcctgcagttgggtgagagtctctcccattaaaatacctgtgtttgatcaagtgtctctatcattagaattcctgtgttcggctggaaatctctcttaatagaatgcctggggtcagccagttgtctccatcattagactgcctgggtttggctaagagtgcctctcattggaatgcctgggattgcccaagtggctctacgattagactgcctgtggtcccccagatgtctctttcatttgaatgcctggggtcgtacaggtgtctctataattagactgccagtagtcagcaagtagtcttttccattagaatacctgtggttgccaagtagtctctatttttagactgcctgcagtcacccaatagtctcccattagaatgtgtgttgtcaactggaagtctcttgcattagaatgcctgtgttgctcaggagtctcttccagtagaatgcctggggttggctagttgcctctataattagaaagcctggggtcttccttgagcctctcccattacatgtctttcagtcgaccaggtaggtgtttctatcattagactgcctggggacggccaggaatctctttcattggaatgcccacttttgcccagatgtctttatcattagactcctggtgtcagccgggagcctctcccattaaaatgcctaaggcagctcagttgtctttatcattggactgcctggggttggccaggagtctttccaactagactgcctggggtctgccgggagtctctcagattaaaatgtttttgatcacccaggtgtctctattattagactgcctggggtcggcagaaaatccctgccattagaatgcctttggtcgcccaggtgtctccatcattcaacttctggagtcagctaggagtccctcccattacaatgcctagaatcgctgggagtctctcccattataatgcctggggatgcttaggtatctttagcattagaatgcctgtggtcagccaggagtctttcccaataaaatgcaaagtgttgccccatgtcaatattattagaaggcctggggtcagctgggagtctctcccattagaaaacctggggtctgccaaaagtatttttcattagaatgcctggcatctcacagatttctctattattagaatacctggagttggcatggagcctctccaattaaaatgcccgtgtcacccagatgtctctataatttgactgcttcgggtcagccaagagactctttcaagagaatgcctggggttctctagaaatctctcttattagaatgccaggtgtctgtattattaaaatacctggggtagttctggagtttcacccattcaaatgcctgtggttgcccaggtgtctctatcattagactgcctgtggttggctgggtgtctctcccattagaatgtgtggggtcgatttggtgtcgctattattaggttgccttgggtcaaccaggagtctctttcattagaatgcctggggttggccatgagtctctcccattagaatgtctggggtcgcccaggtgtctctatcattagacttgcctggggtcagcttggagtcgcttacattagaatgcctggggtcaccctggtgtctttatagttagactgtctgggctcagtgtgaggtttctctcattagaatgcctgagtttgcccagttgtctctttcattagactgcctgggatcggccaggagtctctcccattagaatccctgaggcagcccagctgtctctatcattagattgcctgagtttggtgaaagtttctcccattagaatgcctcaggttgcccaggtgtctctattattagactgcccatggttggccaggtgtatctcccattagaatgcctcaggtccctcaggtgtctctactattagactgcccatggttggccaggtgcctttcccgttcgaatgcctgggattgcccaggtgtctctataattagactacttgggatcggtcagaagtgtctcccattcgaatgcctgtttttacccaggtgtctgtatcattatactacctgtcatcagccagtcatttcccgttagagtgcctaggttgcaccaaaaatcccttgcattagaatgtttggggtctcccaggtgtctctattgttagactgcttgggttcagtcagtagtctttcccattacaatgcatgaggtcgcccaggtgtctttatcactagacagcctggggttggctgggagtctctcccattagaatgcctggggtcattcagatgtcttcataattagactgccttgggtcacccaggagtctctccagttagaatgcttgctgttgcccaagtgtccttatccttaaactgtctggtgtctgccaggggtctgtccaattagaatgcctggggttggacgggagaaagcctgtggttgctcagctgtctctatcattagaatgcctggggtcagccgaaagtctctcccattcgaatgcctggagtcacccatgtgtctctcttattagccttcctggcatcagccaggagtttcttccattaaaatgcctgagatcaccaagatatctctttcgttagacttcctggggtcagccaggaagctctctcattacaatgccttgtgtgaggtgaaagtctttcccagaagtatgcctggtttctctatcattagacttcctggggtcaaccaggaatctcacacacaagaatgcctgtggttgcccacgtttctttataattagactgtttggccagaactctcttccattagaatgtctggtgttgcccaggtgactctaccattagaatgcctagaattggccagaagtctctcccatgaaaatgcctgggtcacccaggtgactctatcactagactgcctgggattgggtgggagtctctcccattataatctctgtggtcaatcaggtgtctctatcattagaatccctgaggtctgctggcaatcttttctattagaatttctgtttgcccaggtttctctatcattagactgcctgaggtcagccggcacgttttcccattattatacctgggataataatttcccattattatacctgggataatattgctcatgcacctctatcattaaacaacctaagtttggaaggggtctctctcattagaatgattggggttgcccaggtatctctttcattacactacctggggtcagctgggaatctctcccattaggattcacaccaagtgtctgtataattaaactgcctggggttgcccagttatctctttcattacaccacctggggtcagctgggaatctctcccattaggattcacaccaagtgtctctataattaaactggctgggctcagccaggagtctttcccattagaatggttatggtcactcaggtgtctttaccttagactgcttgaggtaagccaagagtctctcccattagaattcctggcatcgtctgagagtctttaacattagaatgcctggggtcatgcaggtgtctctataattagactgcttgaggtcagcaaagagtctctcccaagagaatacctggggttggctgaaagttttgcccattacaacgcctggggttgccgaggtgtctctatcattagaatgcctggggttgtccaggagtctctcccattagaatgcctagggttgcctaggtgtctccatcattagactgactgcagtcagctgtaaatctctcccattagaatgcatgggatcacccaggtgtctctatcactagactgccttgggtccgccgggagtcttttccatttcaatgtttcagattgcccccatgtctctacaattaggctgcctaagctcgtccaggagtctctcctaataaaatgcctgtggttggccaggtgtctctatcattagtctgtctaagttcagctgggagtatctcccattagaatgcctggggtcattcaggtgtctgtatcatcacattgcctggggtcgccaaggaatctcttttgttagaatgtctggggtagcccaggtgtctctataattagactgctgggggtcagccaggagtctctcccattagaatacctgtggtctcccaggtgtcttctttctaagactgcctgtgatcgacctcaagtcttccattaaaattcctgggatctgctgggagtctttttccttagaatgcctggggtcaccaaaatgtctttatcattagactgctggggtttgaccaggagtctctcccattaaaatgtctgaggtctccaaagtgtctctatcattagactgcctgggatcagctgggagtctctcccattagaatgcctggggtcgaccaggtgttgttatctttagtctacctgggttggccaggagtttcttccattagaatgcctgatgtcagatggaaatatctcctattagaatgactgaggtagcccagttttctctgtcactagaatgcctgggatcacccaggtttccctatcattataatgccagagattggcctaaattctccttcattagtgttccttgcatcaccaaggtgactctctccttagactgacttggtttggtgggtagtctctctcattagaatgcctggggttgccctgttgtctgtaacattagactgcctgaaattggccggaagtctcttccactggaaggtctgggttcgccaaaatgactctatcattagactgtctggtgtcagttggaagcctctcccattagaatgcctggggtaagatggaattctctaccattagaatgcctagggttggctgggagtctctcccattagagtgcctgtggtgtcccaaatgtctctatcattagaatgcctggggttgaccaagaacctctttcattagaatgtgtgggtttgcccaagtgtatctatcattagactgcctgtggtcaatggagtctctctggattgaatgcctggggtcgctctggtgtctccaacattagactgcttggggttgctcagaagtcacccccaatgcctggagtcagcatggaatctctccttttaaaatgccttgtgtctcccagatgtctctatcattagactacttggagtcatccgggagtctctccaatgagaagacctggggctgcccatgtgtctctattattagactgccttgtggtcagccttacattagaatgcatggggtagcccaggtgtctctatcattaaattgcctgaatttggctagaagtctatctgtttagagtgactagagtgaacctggagtgtctcccataacaatgcctggtgttgcccaggtgtcttcaccattggaatgcctggtatcagccaggagtctgtctcattagaatgcctggagtgacgcaggtgtctctatcattagactggctggggtcggctaggaatgtctcccattagaatgcatggggtaacccagatgactatcctttgactgcctggggttggtgaggagtctctcccattataatgcttgaaatcaaccagtattttcacaaatagcttgtttcgagtttttattgagggatattcattttttcactacaggcctcaatgggctcagaaatgtcccttttgtaaactctacaaaaagagtgtttccaacatggtgaatcaacaggttagattcgtctagattaatccacacattagaaagaattttcacagatagctctggttattattacaagatatttggtttttcttttttctattttttattatactttaagttttagggtacatgtgcacaatgtgcaggttagttacatatgtatacatgtgccatgttggtgtgctgcacccattaactcgtcatttaacattaggtatatctcctaatgctatccctcccccctccccctaccccacaacaggccccggtgtgtgatgctccccctcctgtgtccatctgttctcattgttcaattcccacctatgagtgagaacatacagtgtttggttttttgtccttgcgatagtttgctgagaatgatggcttccagcttcatccatgtccctacaaaggacatgaactcatcattttttatggctgtatagtattccatggtgtatatgtgccacgttttcttaatccggtctatcattgttggacatttggcttggttgcaagtctttgctattgtgaatagtgctgcaataaacatacctatgcaagtgtctttatagcagcatgatttataatccttcaggtatatacccagtaatgggatggctgggtcaaatggtatttctagctctacatccctgaggaatcaccacactgacttccacaagggttggactggtttacagtcccaccaacagtgtaaaagtgtttgtctttctccacatcctctccagcacctatggtttcctgaatttttaatgattgccattctaactggtgtgagatggtatctcattgtggttttgatttgcatttctctgatggcaagtgatgatgagtgttttttcatgtgtgttttggctgcataaatgtcttcttttgagaagcgtctgttcatatcctttgcccacttgttgatggggttgtttgtttttttcttgtaaatttgtttgagttcattgaagattctggatattagccctttgtcagatgagtagattgtaaaaattttctcccattttgtagtttgtctgttcactctgatggtagtttcttgtgctgtgcagaagctctttagtttaattagatcttatttgtcaattttggcttttgtttccattgcttttggtgttttagacatgaagtcctcgcctatgcctatgtcctgaatggtattgcttaggttttcttcctgggtttttatggttttaggtctaacatgtaagtctttaatccatcttgagttaatttttgtataaagtgtaaggaagggatctcatttcagctttctacatatggctagccagtttttcaagcaccatttattaaatagggaatcctttccccatttcttgtttttgtcaggtttgtcaaagatcagatggttgtagatgtgcagcattatttctgagggctctgttctgttctattggtctaaatctctgttttgataccagtactatgctgttttggttactgtagccttgtagtatagtttgaagtcgggtagcgtgatgcctccagctttgttcttttggcttaggattgacttggcgatgtgggctcttttttggttccatatgaactttaaagtagttttttccaattctttgaagaaagtcattggtagcttgatggggatggcattgaatctataaattaccttgggcagtatggccattttcacgatattgatttttcctatccatgagcatggaatattcttccatttgtttgtgtcctcttttatttcattgagcattggtttgtagttctcattgaagaagtccttcatatcccttgtaagttggattcctaggtattttattctctttgaagcaattgtgaatgggagttcactcatgatttggctctccgtttgtctgttactggtgtataagaatgcttctgatttttgcacatttattttgtatcctgagacttttctgaagttgcctatcagcttaaggagattttgggttgagacaatggggttttctagatatacaatcatctcattggcaaacagggaaaatttgacttcctcttttcctaattgaatacactttctttctcctgcctgattgccctggccagaacttccaacactatgttgaataggagtggtgagagaggacatccctgtcttgtgccagttttcaaagggaatgcttccagttttcgcacattcaatatgatattggctgtgggtttgtcatagatagctcttattattttgaggtacatcccatcaatacctactttattgagagtttttagcatgaagggctgttgaattttgtcgaaggctttttctgcatctattgagataatcatatggttttgtcattggttctgtttatatgctggattacgtttattgatttgcctatgttgaaccagcgttgcatccctgggatgaagcccacttgatcatggtggataagctttttgatgtgctgctggattcggtttgccagtatttattgaggatttttatatcaatgttcatcagggatattgttctaaaattctctttttttttgttgtgtctctgccaggctttggtaacaggatgatgctggcctcataaaatgagttagggaggactccctctttttctattgattggagtagtttcagaaggaatggtaccagctcctcctttttcctctggtagaattcagctatgaatccatgtggtccttgactttttttgcttggcaagctattaattattgcctcaatttcagagcctgttattagtctattcaaagattcaacttcttcctggtttagtcttgggaggtgtatgtgtcgaggaatttatccatttcttctatattgtctagtttatttgtgtagaggtgtttatagtattctctgatggtagtttgtatttctatgggatcggtggtgatatcccctttatcattttttattgagtctatttgattcctctctcttttcttctttattagtcttgctagtggtctatcaattttgttgatcttttaaaaaaaccagctcctggattcattgattttttgaagggttttttgcgtgtctatttccttcagctctactctgatcttagttgttcttgccttctgctagattttgaatgtgtttgctcttgcttctctagttcttttaattgtgatgttagggtgtcaattttagatctttcctactttctcttgtgggcgtttagtgctataaatttccctctacacactgctttgaatgcgtcccagagattctggtatgttgtgtctttgttctccttggtttcaaagaacatctttatttctgcctccatttcgttatgtacccagtagtcactcaggagcaggttgttcagtttccatgtcattgagcggttttcagtgagtttcttaatcctgcgttctagtttgattgcactgtggtctgagagacattttgttataatttctgtccttttacatttgcggaagagtgctttacttccaactatgtggtcaattttggaataagtgtggtgtggtgctgaaaagaatttatattctgttgatttggggtggagagttctgtagatatctattaggtccacttggtgcagagctgagttcagttcctggatatccttgctaactttctgtctcgttgatctgtctaatgttgacagtggggtgttaaagtctcccattattactgtgtgggagtctaagtctctttgtaggtctctaaggacttgctttatgaatctgggtgctcctgtattgggtgcatatatatttaggatagttagctcttcttgttgaattgatccctttaccattatataatggccttctttgtctcttttgatctttgttggtttaaattctgttttatcagagactaggattgcaattcctgcctttttatgttttccattttcttggtagatcttcctccatccctttattttaagcctatgtgtgtctctgtatgtgagatgtgtttcctgaatacagcatactgatagctcctgaccttttatccaatttgccagtctgtgtcttttaattggagcatttagcccatttgcatttaaggttaatattgttacgtgtgagtttgatcctgtcattatgatgttagctggctattttgctcattaggtgatgcagtttcttcctagcctcaatggtctttacaatttggcctgtttttgcagtggctggtatcagttgttcctttccatgtttagtgcttccttcaggagctcttttagggaaggcctggtggtgacgaaatctctcagcatttgcttgtctgtaaagcattttatttctccttcacttatgaagcttagtttgactgtatatgaaattctgcgttgaaaattctgttctttaagaatgttgaatattggcccccactctcttccggcttgtagagtttctactgacatatctgctgtttgtccgatgggcttccctttgtgggtaacccgacctttctctctggctatccttaacattttttccttcatttgaaatttggcgaatctgacaattatgtgtcttggagttgctcttctcgaggagtatctttgtagcattctctgttatttcctgaatttgaatgttggcctgccttgctagattggggaaattctcctggatattatcccgcagagtgttttccaacttggttccattctccctgtcactttcggatacaacaatccgatgtagatttggggtttttacatagtcccatatttcttgaaggctttgttcatttctttttattcttttttctataagcttctcttctcacttcatttcattcatttgatcttccatcactgataccctttcttccagttgatcgaattggttactgaggcttgtgcattcatcatgtatttctcgtgccttggttttcagctccatcaagtcctttaaggacttctctgcattggctattctagttagctattcatctaactttttttcaaggtttttaacttctttgccatgggttcgaactttctcttttagctcagaatagtttgatcatctgaagccttcttctctcaagtcgtcaaagtcattctccatccagctttgtttcattgctggtgaggagctgcattcctttggaggaggagaggcactctaatttttagagtttccagtttttcttttctgttttattccccatttttgtggttttttctacctttggtcttcaatgatggtgacgtacagatggggtttttgtgtggatgtcctttctgtttgttagttttccttctaacagtcaggaccctcagctgcaggtctgttggagtttgctggaggtccactccagaccctatttgcctaggtatcagcagcaaaggctgcagaacagcggatattggtgaacagcaaatgttgatgcctgattgttcctctggaagttttgtctcagaggagtacccggccttgtgaggtgtcagtctgcccctactggggggtgcttcccagttatgctacttggggttcagggacccacttgaggaggcaatctctccattctcagatctccagctgcgtgctgggagaaccactactctcttcaaagctgtcagacagggacaattaaatctgcaaaggtttctgttgccttttgtttggctatgtcctgcccccggaggtggagtctacagaggcaggcaggcctccttgagctgtggtgggctccaccaagttcgagcttcctagccactttgtttacctattcaagcctcggcaatggtgggtgcccctccccaagcctctctgccaccttgcagtttgatcttatactgctgtgctagcaataagcaaggctccatgggtgtagaaccctccaagccatgcaagggatataatctcctggtgtgccatttgctaagaccattggaaaagtgcagtattatggtgggagtgacctgattttccaggtgccatctgtcaccactttctttgactaggaaagtgaattccctgaccccttgtgcttcccaggtgaggtgatgcctcaccctcttttggctcatgctcggtgtcctgcacccactgtcctgaacccactttccaacactccccagtgagatgaacctggtacctcagttggaaatgcagaaatcatccatcttctgtgtggctcatgctgggagctgtagactggagctgttcctatttggcttttttggctccacccctgatgtttggtttttcacagtaggcctcaatgagcacaaaaatgtccctgcatagattctacaaaagaaaaagaaaggttttttaacctgttgaatcaaaagaaaggtttaactctgtgagatgaatccacttgtcacaaagcatcttcacagatagcttgtttttagttcttatcgcatgatatatcatttctcactataggcctcaagaggctcagaaattttcctttgtagattctacaaacacagtgttcccaacctggtgaataaaaacacatggtttagtcaatgagatgaatcaccgactaaactgaagatcttcacaggtagcctgtttacagtttttgccttgggacattcggtttttcactataggcctcatggaactcaggcctaattttgaacaatgccttcgtagattctacaaatagagtgttcccaaactggtaagtcaaaatgcaggttctattcagtgagataaatctatatatcacaaagcattttcacagatttcttgtttcaaatttttatggcaggatatttgttttttcactataggccccaatgggctcagaaatgtcccttcatagattctagaataagagtgtttccagcctcttaaatcaaaagaaagtttccatttcgtgagataaatccacacatcataaattatttttacagatggcttgtttctattttttatcttgtgatattctgtttttcactgtaggcctcaagtggctcataatgtattgttgtaaattgtaaaaaaaaaaaaaaaaaaaaaaaaaaaaaaagagtgtttttaactcttgggatgaatccacacattgagaagcattttcacagagagcttgtgtctagtgtttatcatgggatatttggtttttgactatcagcctcaatgtgtgctaaaatgtcccttcacatattctaaaaaaaagggtatttccaacctggtcaatcaaaacgcaggttacattacagaagatgaatccacacatcacaaagcatttttacagagaggttgtttctagtttttaatcatgggatattcagtttttcactattggcttcaatgggctcagaaatgttcctttgtagatcctacaaaaataaagtttcccatttggtgagttaaaaagcaggttccattaggtgagatgaattcacatattgtaatgcattttcacagagagcttatttctcataaaaaattgcaggatagtcagtttttcacaatgggccacaataatgtcataaatatcccttcgtagatactacaaaaggagtgtttacaacctgctgaatcaaaacacaacttttattaagtacaataaattcacacactacaaagccattttcaacagatagcttgtttctcgtttttaaggtgggatattcagtttttcactataggtcccagtgggctcagaaatgtcacttcatagattctacaaaaacagtgtttccaatctggtgactcaaaacactggttccattcagtaagattaatccatatatcacaaaagattttaacagagagcttgtttctagttgttatcacaaaatattcggtttttcaatataggcttcaaagagttcaaaaatgtacgttcttagattctacaagaagagggtttcctacctggtgaatcattacatagactcaattcagtgagatgaatccacatatcacaaatcattttcacagatagattgtttctagtttgtatccagggttttttgttttttgttttttttttactgtaggccccaatagactcagaaatgtctcttcataggttctgcagatgttcccaacctattcaatcaaaatgaagctttaactctgtgaggtgaatctattggggaacctgccctgataggcacataggttcttttctattttccctaagcttcagccagcttgagaaataaagggacaaagtacaaaagagagaaactttaaacctgggcatccaggggagacaacacatgtgggtaggttccaggatgccccacaagccgtaaaaccagcaaatttttgttagggagtttcaaaacgggagggagtatatgaataggtgtgggtcacagacaccaagtacttcacaaggtaatagaatattacaaggcaaataaaggcagggtgagatcacaggaccacaggaccagggtgaaattaaaattgctgatgaagtttctggcaccactgtcattgataagatcttgtcaggagacaggttttgagagcaaccgttctgactaaaatttattaggcaggaatttcctcttcctaataagcctgggagtgctatgggagactgggtctatttcacccctgcagtctacagaccataaaagacaggcattcctgggggtccgtctatagacctataccaccaggcatgtattctctttcccagggatgttctttgctgagaaaaagaattcagcaatatttctcccatttgcttttgaaagaagagaaatgtggctctgttccacctggctcaccagtggtcagattttaaggttatctctcttattctctgaacaattgctgttatcctgttcttttttcaaggtgcccagatttcatatttgttcaaacacacatgctctacaatttgtgcagttaacgcaattatcacattgttctgaggcaacatacatcttcctcagctgacaggattaagagattaaagtaaagacaggcataggaaatcacaagggtattgattggggaaatgataagtgtccatgaaatcttcacaatttatgtttagagattgcagtaaagacaggcataagaaattttaaaagtattaattaggtgaaataataaatgtccatgaaatcttcacaatccacattcttcagccatggcttcagctggttcctccatttggggtccctgacttcccacaacatctctccctttctttttatataaatgtgccatggtgatgaaggcttgttcgttctctcaattttgatgcaggattctttgactggtctggcacactaaaaacaagccgattaaacagagaaacataattccaaaatttactacagtggagcccccaataaacttaatccaagttgtgggctttaatccataaagattttctgccacctgatctaacacctcagctccaggcagaatggataagtgagcttgagaggattcaaaaatttgtttctttaatttagttgtgtccaatgataaattatcttccctacctagaaggtgtcctttgaccgtttcccatgaatgatcagtctcattataggaatatggggtgatgcagaaatccaaagtattccactggcactgcatttgcatgcaatgttcgaaactcactacccaatctccaagccaaataacagactgttttaaatcattaatttgatttgccaatttttgatcaatgccttgttaagaattccacatttgggtggaattggcttgccaatcattaacaaaataagccgtttgaatggattggtgtaatgccattccggcagtggtggtcattgcagtgactgtaattaggcccatgataacagtgatcaaagtgaaaacaaatctcttggacctttttagaattcgctgtcgcacttcattaattaaatgtattgagggggaggattcccaaggtctaggtaaagttactggaatccagattccttcttaagatcgaaccaatattatgcttctcttggagtcaaaatgggagttaatacaaaggtatagatgacaattaatgcattggacagtttgattattcgtccaaattttgatatttcctactaacagcatgtaagggggcttaacacaactctgtatgggaatagtcaggttggaggtaagtaaagcagaatgtctcgttctacgttgataaggagagagtgggacagtagtgggaaaaacagtcagaagagttttcctttcccatacttgcagtccagacatggcaatagccaatttccaaagttctgggtgttcaggctcagaatggggagtatcatacgaggcctgggtgggggataatgcctttatcttcccattttaagggaaagcataagctgatcctcctatgcaaagtagaatgatgattcttgttctcccaataagaaaaaaaataagtagcctccaggcattcccttccaccagaggagcaattgttttttaaatagccctttggtgcccagcctattattaaaccatatgagtcattttttaatattactgcatgtgagttaacacaatcttcccaaattaaagttttagatgggccctcaaaatttttagggcacgattttcctgcaggtttatattgaaagtatggggtatctcccattattcttcctttcatttgttttaaaggagaaagagagaggccagagaccaaatgtcctgttttatctgtagttgatctttccggaagataagcagcctagacttgagtttccagatggatgcaaccaggtgcatgtctgaggcacagagacgggtatttacaacccatggtaacattaaatgcagtgccttcttctcctggttgagcagggcaacggtcatctgtggctccaggcagtcacacactatcgttagtgtagatttgtgcaggagcatctaccctggtgagaggtcgaataagtggaggaagaggcacataagcccaataagaataattatgtgtagcaggtaaatcagtgtgagaggaaactggtgagacagaaagtataaggaggagaatcattaaataaaacctagtgtaaatgagattgaaggctgaaggaggaagagaagaacagagggatgttattttcaggctaatagaaatggtgagatttttaggtttgtaaggagaaaaagaaaggtaatcaggagaagtgggattagttagatgggtctccattgccatcagggaggattgatttaaatccattgtgatttggtgtgcctttttctgagcagttggcacagatcttaccacttctgaaggtagtctctgacacagacgtcttttctctgtggttttcattgtcagtgttcacccgaagcttgaatcttctggtgggttcccagacaggggattgatgatctcctggtgaaaccaggcatatcctcttccctacgttataattgtgccagattcccaggtattggcttgggagtttttccataacactggtttgccttcgtttaaggaaaattttttgcctgtataatggcgttcagctgcagttagagtattatctttagaaacatttaaaaaaattaaagtaaacaatgccaaatgtaattgggagtggggagtagttaaatcatgtttaggttgttcagactgtttggacaattgggtttttaaagtgtgattggcccgttccaccacagcctgtccctgaggattgtaagggattccagtaatatgggaaattccccactgttgcataaatgaatcaaaagccttactaacatatccagggacattgtgtctttatttgatatggaagccccataactgcaaagcaagaatacagattttttttaacataggccctgccttcccctgtttggcaagtagcccagataaaacctgagaaggtatctgcagagacatgcacatatgacagtatgccaaaggagctaacatgagtcacatccattttccataaagcattaggagttaggcctctaggattaacacaaggttcctgatttggaagtacgaagacctggcactgagagcagccgtgaacaataaacttagcctgtttccaggtaagagcaaatttatcttttaatccagcggcattgacatgagtgagattatggaactcctgagcttcttgggttgtaaaagagaccaaacagttgactttatggttaccagcagacatgggtcctggtaaagtggtatgagacccaatatgtgtaatatagaaagggtgtctacgttggtgaaccacctgttgtaaccttgaaaataaagaagccaattcagaattatcaatgtgtttgatagcagcagtttctatatttttagtggcatgtacaacataagcagaatctgagacaatatttaaaggtttgaggaaatcctgtaaggcagtaatcacagcaattaactccaccttttgagcagaagcataagaggtagaaataagtttgtctgtaggacctatgtaaccagcattgccattactggagccatcagtgaacactgtaatggcctcaggaatgggttgatctttggttaattgaggaaccacccaagacgtcatttatataaaaatcaaacaatttgttttttgaataatgattgtcaataacgccaataaaatcagccaagtgaatttgccacagtacagaatgttgaaaggcagattgaacttcaagccaatttaaaggaagtacaattacatttggatcaaatctagaaatttgaagtattctacactgagcctgcccaattaatatggctatttggtctacataaacaaagttttggacatagaatgaggaaggaaacgccactccattaaatcattatgttgaactattagtccagtaggggagtgtgatgaagcaaaaaacagaaactgaaaaggctgaaacggctgtactctagataactgggaggtctgaattctttcctctatgaattccagttctagtaaagcctcaggggtcaaagtcccggggctgtggagatcggaatctccccacagcatagagaacaagttacacagcgcataagttggaatgcctaaagtaggttttaaataatttacgttacccaaaaggttttgaaagtcatttaaagtgtttaaagaatctctcctaatttgaaatttttgaggttgaatacattgtttatcgatcaccattcctaaatattgaacaggagtgatctgttgaattttatcctgagcgacgtgtaatctagcctctgtaacacagtggcttaaaatgtggtaacagtcaattaattctttatcattgggggcagcaattaaaatgtcatcaatataatgaagaatatacacctcaggaaattgggcttgaactggtgaaagctcttgtccaacataaagctggcagattgtagggctatttagcattccctgaagaagtactttccaacaattatgagctgcaggctcctgattattgatagatggtacagtaaaagcaaatttttcacaatccgatttatgtaaagcaatatgaaaaaaagcaatctttaagatcaataactatgagaggccaatttttaggtattagagcaggggcaggcaagccaggttggacggcccccataggtttaattacagtgttaatggcccttaaatcagttaccatccgccatttgcctgatttcttttttactagaaacacaggagaattccaaggggaaagagaaggttccacatttccaagttgcaactgctcagaaaccaattgatttaaatctcccagtttttctttagaaagcggccactgctgaacccaaacaggtgtgtcagatttccattgcaaaggaataggatcaggaggcgtggcagcagctgccactaaaaaggataacctaaaccagccctgttttcttttatagtaactgggaggggtttactaatcccctcgtgctgtggtctgagaccgagtccaggaacaaaccccatattttccatcatatgctgactgggagcattataagagttacgtggaatattaatttcagcccgccattgtgccagtaaatctctaccccaaagatcaatgggaattggcatgatatagggctgaattttacccttttgaccatcagggccagtgcaaggcaaaataaatgtgctctcataaacttccttggcctttccaacacctactagtcccatgttagtgggatgtttaagccaagaggaaggccataaactagaggaaataagagaaacatcaccaccagtatctactaagccctcaaactttcttccttcaatgtgtatggtgcaggtgggctgttgtttagcaattacattaatccaataagcggccttttcactgccagagcccatcccagggccatgtgtcttatctcttttgtttaaaatgatattaggtagtaaaagcaattgagcaattgactcaccagccagaatggaaacaggaaccttggcagacacaattaatttaatctcgtcaacggaatcagatttaatgagaccagtttgaatggtgactcccttagcagaggtggatgctctacctaacacccggcccaccgaaccttgagataaagggccagtgacccccgtggggacaatcaagggcaaagaatcaagaagtaaattcagaggaatagtactacagatatcaaccatcccacctcctactgtggaggttgacaagcattgtagtgagacagaagaagctgggacccatttggttttgctgtaggtagatttgtttgtgctaggggttgcattgggactgcctgaagtggaaacacaatgttggtcttagttggaagtgtcccgtttgatgctgggacctgggactagccccactccctatttccctgtcactgtggtagggggtttccatctatatcatacttagagtggcaaatatttgcccaaagtttacctttgcgacaacgtgggcaaacagtaggagcaacatttggccatgtttgttgaactggcttggcctcttgtaagtttttaacagtgcaattttttcaaatatgaccaagttggccacaattatagcaggctccaagagaagaattaatgggaccagtttggttggtgtccttcatggcccgtgcccacagaatagctttgtgggtgtctgatccaatgccttcacaaactttaatatatgcaggcaacacgtgatcaggtaaattttgttgttggacagaacgcatggccaatttacattcagggattgcattttcaaaagctaatatacgaaggagaatgccttgagcgtgcttcatcagagacagattttttcaacagcatcttgtaatttagctaaaaaatcagggaataattcagagtgaccttgtttaactatggtaaaagaaacaggagcttggcctggagtgcgtaatttattccaagctctcatacacacctttgttacttgttctgtggtaaaggcatcaaagtttaattgggcataagcatcagagaaattatcggagcctgtgagctgagcctgagtaattagaatgccattactcatatttagctgagcctgcaaacaggcctcctctgaccaccaggtacagaattgtaaatgctgacatggggttagaacagcttttgccaaaaggtcccaatctaaaggaagtaaagtgacctcagtacaaaaagtttgtaaaactatcttaacgtaaggagaagtaggaccatactgagtacaagcatccttaaattcttttaaaaaggtaagattaagaggtacataaagatgcatttgtaacccttggaagttaggtggatctagcacaaccagagaagtccattcatctaatccacttatttctttgttttggcataataagcattgcattgaagtttcaagagtaggcatctgagatggagtcggcatggaagtgacaggaaaagcatgtgcagttaagggaaactgagggtgagagggtcggaccaggatgagaatgtgagaaagaggcattgggggagcagaacgagcagaagtatactggtgattactgttgttcaagtgtgaagaagggtatagagaagcaatctgagtggatggtaaagtgactggttgaggaaacgaaacgacaggagggtgaggggctgaagtgtatggtgggagggcctggagaatgataggtaaattgtagtttggtcctggagccattagctgacttcagagatttgaagagagaagaattagcatacctgtggtactgggctgtgtgctttgcagccgtgggagtttcaagtactggctcttcatgaaattcgtgaaaagaagataagtagggggtaactttaaaccaaagtcaccatagttagacatagaattttcagcatcattaggtgggggaggagtagccaaagggagagtctgatcagatgggggccctgtgggagaggaaggctgagggaaaggtggaggatctgaggaaaaggcagaaaactgtggcaactgcagggggtcacgagatccacacaccactaagacagcaggtaccaaccaccccaaacagtgacaggaacataataccctgctgagaccagctaccagaatgctgtaccaacacaatcccacacttttacatctatggttcctttttcaggaaaccaaggacagaaccactgccctgaatagagtgaccatattttccatggttactcggacactgccctgttttaacaggagtttaatatagcagatataagtatgatgcttagactctgcatgacccatagttaacccagaccatacatagactactcatcactcatcagggattctaacaagtgtatctgtggaccaagccgatgacgtttcaccacacctaccaaagggaatcgggttccctcatgcacttaggaaaaaagaaagacaatgtgtgtgctagatattggggaacctgccccaatagtcacgtatgttctttcctatattccctaagcattggccagtttgagaaataaagtgacagagtacaaaagagagaaattttaaagctgggcgtccggggtagacatcacgtattggtaggttccatgatgccccacaagctgtaaaaccagcaaggttttattaaggcgtttcaaaaggagagggagtatacgaataggtgtgggtcacgaacatcaagtacttcacaaggtaatagaatatcacaaggcaaatggaggcagggcgagatcacaggaccacaggaccgtggtgaaattaaaattgctaatgaagttttgggcaccattgtcattgataacatcttattaggagaaagggttttgagagcaaccggtctgactaaaatttattagacaggaatttcctcttcccaataagcctgggagcactatgggagactggggtctatttcacccctgtagtctacagaccataaaagaggggcacgcacaggggggccatctatagacttatacccctgggtgcatattctctttcccagggatgttccttgctgagaaaaagaattcagcaatatttctcctatttgcttttgaaagaagagaaatatggctctgttccatctggctcaccagcagtcagagtttaaggttatctctcttattctctgaacaattgctcttatcgtgttcttttttcaaggtgcccagatttcatatttgttcaaacacacatgctctacagtttgtgcaggtaacacaattatcacattgtcctgaggcaacatacatctgcctcagctgacaggactaagagattaaagtaaagacaggcataggaaatcacaagggtattgattggggaaatgataagcgtccatgaaatcttcacaatttatgtttagagattgcagtaaagacacgcataagaaattataaaagtattaatttggtgaactaataaatgtccatgaaatcttcacaatccacattcttctgccatggcttcagccagtccctccatttggggtccctgacttcccacaacatgaatccacacattgcaaaacatttttactaatagcgtgtttctcatttttaaggtgggatattcagtttttcactataggtttcaaagggctcagaaatgtgccttcattaattttacaaaaacagagtttccaacctgttgaatcaaagaaaaagttttgcactgtgagatgaatgcacatatcacaaagaattttcatagatgccttgtttctggtttttattgcgggatatttggtttttcactataggtctcaatgagctcagaaattacaatttctagattctacaaggagagtgtttccaagctgttcaatcaaaataataatttaactctgagatgaatcaacatatcacaagcatttttcacagatagcttctttctagtttttatcacaagatagtctgttttatattataggcctcaatgggctcagaaatgtccctttggagattttacaaaaagagtatttccaatcaggtgattcaaaacacaagttatatttggtgagatgaatgtacacattgcaaagcattttttcaaatagcttgcttctaatttttatcacgaaatatttggtttcttactgtaggtctcaattgactcataaatgtcccttcatagattctacaacaacagtgtttttaacctagtgaatcaaacaaagggtttcattcagtgagataagtccacgcattacaaagcactttcagagcaagcttgtttctagtttttatcatgggctattcagtgtgtaacaataggagtcgaaggcctcagaaatgtcccttcgtagattctacaacaacagtgtttccaacctatttaattaaagcaaaggtttaactttctaagatgaatccagacaccacaaagcatttttatacttgccttgtttctagtttttattgtgggatattcgatttttcaacataggcctgagtgggctcagaaatgtcttttcattgattctacaaaaagagtgtttccaacccgtttaattaaaacaaagatttaactctgtgagatgaatccaaacatcacaaagcatttccacagatagcttgcttctggtttttatcactggatattccgtttttcactataggcctcaatgagctcagaaatgttccttcatagattctacaaaaagcaagtttccaaggtgatgaatcaaaacaaaagtttaaatctgtgatgtaaatccagaaaacccaaagcattttaacttatagcttgtttctactttttaacatggaatattcagtttttcattataggcctcagtgagctctgaaatgttccttagtagatgctacaaaaagagtgtttcaacctattgaatcaaaacaaatgtgtaactttgtaagaggaattcccacatggcaaagcatttgcacagataggttgtttgtacttttcattgcgggatactctgtattttattataagcatcaatgctcccagaaatctcccttcatagattctacaacaagagtgtttccaacctgttgaatcaaaacaaaggtttaactctgttagatgaatccacatattacaatccattttcagagataacttttctctggttttattttgggatattctatttttcagtataggtttcaattgggtcagaaatgtttcttcatagattctaagaaaagcgtgtttccaaattgatgaattaaaagagaggtttaactctgtcagatgaattcagaccttgcaaagcatttcaacggatagcttgtttctactttttatcacaggatattctgtttttcactataaacttcaatgggatcagagatgttttttgtagattctgtaaaaaagggtttttcacctgttgaatccaaacaaagctttaactctgtgagatgaatccatgcatcacaaagcatttttacagatagcatttttctacttcttatagcaggatattgggtttctcagtataggcctaaatggactcagaaatgtctcattgtacattctacaaaaacattgtttccaacctggtgaatcaaaacagagattccattcggggagacgaatccacacatcacaaagcaacttcacatattgcgtttttctagtttttatcacaggatcctcggtttttcactatgtgcctcaatgggctcagaaatttcccttcctagattttacaaaaaaagtgtttccaacctggtgactcaaaacccaggtttgattcagtgagaagaatccagatatcacaaagcattttcacatacagcttgtttctatatgtttcttgttttattgtgggatatttgtttctttattataggcctcaatggcctctgaaaggtcccttcatagattctacaaagaaactgtttccaaactgatgaatcaaaacaatggtttaactctgtgagataaatacacacattgcaaagcattttcacagttagcttctttagaatgtttaatgcagtatattcagtttttcagtgtaggacttaatggcctcaaaaacgtttcttcatagataatacagtaaaagtgtttccaacctgttgaatcaaaacaaagttttaactgttggagatgaactcacatatggcaaagcattttcacacatagcgtttttatactttttatcacaggatattagatttttcactaccagtctcaatgagctcagaaatttcttttcgtagatactacaaaacgaggctttccagcctattgaatcaaaacaaagttttaactcattgaaataaatccacatttcatgaagcattttcacagatagcttgtttctattttttattgcaaaatatacggtctgtcactataggcctacattgtcttagaaatatccctttatagattctacagcaagagtgttttcaacctggtgaatcaatacacaggttccatttggtgagactaatccacacatcctaaagcattttcacagatagcatgcccaggggtctctatcattatactgccttgggtcagccagcagtctctcccattattatgcctggagtcgcccaggtttctctatcattagactgcctggggtcagcctgaagtctctcccgttagaatgcctggggttgcccaggtgtctctataattagacttcctggtctcagccaggagtctctcacattaaaatgcttagtgtgacattggtgtctctatcattagactgcctgaattgggccaggagtctctttcattggaatgtctggggttgaccaggtgtctctaaccttaggcagtctagggttggaccagagtctctcccattagaacgtctaaggtcatccaggtgtctttttcattagactgcatgaggtctcccagagcccctcccattagaatgcctgggttcgtggatgcattttcatcattagtctggtgcaggtcggtcgctgatatctccaatgagaatgcctggcatctcccaaattctctcaaattagaatgtctggaatcgactgggagtctctcccattagaatgcctgtggtgcccagttgtctatcattagactgcttcatgtcagttgggattctttttttttagaatgcctggggtggcccaggtgtctctgccattagactgcttggtgtcagccaggagtctctcttattcgactgcctggtgtcgcccaggtgtctattttaagactgcatggggttggccaggagatctttcattagaatgcatggaattggctgggaatctctcccattagaatgtttgggtttgctcatgtgtctctatcattagactgctgggttcagccagcagtctctcccataagaatgtctgggattgcccaggtttctctattattagactgcctggtgtcagtcaggagtctcttccattagaattgcctgtggttggccaggagtcttacccattagaattaccaaggtagcccagatgtctttataattagacagcctggggtcagctcgaagtctcttctattagaatgcttggggtccatcaggtgtctctattattagactgcctggggtcagccagaagtgtctcccattaaaatacttgcagtcgttcagatttctctgtcattatactgcctgcgattggccgggagtctctttcattagattgcctgtggttacacagatgtctctatcattagactgcctgggctggcttggtgtctttcccattagaatgccagggttcagatggaagtctctcccattagaatgccttaggtcacccaggtttctgtattattagaatgcctggggtcagatgatagtcttttccattagaatgtctaggatcacctaagtgtctctactattagactgcctgtgttcgaccattagtctctcccattacaatcactgggctcaatcagtgtctctagcattagactgcctggggttgaccacgagtatctcccattagaatgctttctgtcatctgtgagtctctcccattggagtgactggggtcacccacgtgtctctaacattagactgtttgtggttgcacagctctctctaacattagattgcttggggtcatctgagagtttcccccattagaatgcctggagtggagtcccccaggtgtctctattatgagaatgcctggtgtcagccagcagtctctcccattagaatgcctgtggtatcccaggtgtcactattattagaattcctggggtcagtggagggtatctcccataagaatgcctggtgtcacccaggtgtctctaacattagattggctggggtcctttggaagtctccactattaggatgcctggggtcacccaagtgcctctaccattagactgcctgtggtcagttgggaatctcccccattagaatggctggggtcacctaggtgtctctatgcatggattgcctgggtttgtacagaagtctctctaattagaatgcctgaggtcatccaggtgtctgtattattagactgcctggggtcaggcaggagtctctcccattagaatatctggtgtcagttggaattctctctcattagaatgcttggggtcgcatacgtgtatctattatttgcatgcctgggcttgtcctgtagtctctcccattaggatgcctgtggttgcccagttgtgaacattagactgcctggggtccgccaagattgtctcttattaaaatgccttgagttatctgggagtttctcccattagtatgcctgggttcgcccaggtgtctctatcattagactgcctggggtcagctggtaggctctcctattaaaatgccttgggtggcttagattcctctacagtttgactgcctgtgttcagccagcaatctctcccattagaatacctgggctctcccaggtgtctctattgttagactgcctgaagtcagccaggagtgtctctcattagaatacctgtattcatccctatttctttattaaactgcctgcggtttggcgggagtctctcccattaaaatgcctgtcctcgataaggtgtctatcatttgaatgcctgggttcaaccaggaatctctcttattagaacgtctccggtcatcgaagtgtctctatcataagactgcctgcatcagctaggtgtctctaccattagggtccctgaggtcagccgggagtctctattattagaatgccaagggtcgttcagatgtctctatcattagagagtctatggtcagccaggagtcttttttattagaatgcctggtgtcggcccagagtctctcccgttagaatgcctggagtcacagaggtgtctctattattagaatgtctgatgtcggtctggagtctctcccattagaatgtcttaagtcacatagatgactttatcattagactgcctgtgatcagccgggaatctctccaattaaaattcctgaggtcacccaggtgtctctataatcagactgcctggggtcagccagacatctctttcaaaagaatgcctgggtttggctggaagtctctcctattagaatgcctcgggatgcccaggtgtctctatcattaaaacgtcaagtcatctgagagtctcttccattaaaatgcctgcagtcacccagttgtctctatcattagatttcctgcagttggtcgggtgtctctcccactagaattcctggggtttttcaggtgtctctatcattagactgcctggggtaggccacgagtctctcccattagaatgcccagggtcggcggtgagtccctcccattagaatgcctagggtcacccaggtgtctctatcattagacggcctggagtcggctgggagtcactccccttaaaatgcctggggtcgatttggcatatataattatactgcctaggtttggccagaagtttctcccattagaatgcctgggtttgcccaggagttctatcattagactgcctggggtcagctgggagtctcttccgttagaatgcctggggttgctcaggtgtctttattattagactgcctgggatccaccaggagtctctttccttagaatgccttgggtcaccgaaatgtctttataattagactgcttgggttcggcaggagtctatctcattagaatgactgaggttccccaggtgactctatcgttagactaacaggggtcagcaatgaatctctcccattagaatgcctgaggttgcctaggtgtctctaacctaagactgccttttgtcggctagaagtctcttactagaatgcctggggttggctaggagtctcttctattagaatatttggggtcgcccaggtgtatcatttgattgcctgggctctgctgggagtctctcccattagaatgcctgtggttgcccaggtgtctctatcattagactgcctggggtccaccgggagtctcttccattagaatacctggggtcacccggtgtttctgtaattaggctgccttgggtcagcatggagtctttccattaaaatgcctgtggtcgcccaggtgtttctatccttaaactgcctgtagtcggccaagagtctctcccattagaatgcctggaatttcccgggagcctgtaccattagaatgcctggggtcacccagatgtctctgttattagcctgcctaagttcagccaggaatcactttcattagaatgcctggggttgcccaggggtttctatcagactgcctggtgtcagccagcagtctctcccattagaatcactggggttggcagggagtctctcccagtagattaccttgggtcgccacagtgtctctatcattggaatgcctggggtcgaccaggagtcttttgtattaaaatgcctggggttggctgggtatctccaacattagactgcctgcgtttggcattcagtttctcccattataatgcctgtgatcatccaggcgtctctaacattagactgcctgtggttggctgggtgtctctccagtttgaatgcctggttttggctggcagtctctcctattaaaatgctaggggtcgaaaaactgtctttatcattgaagtgcccgtggtagaccagaagtccctctcattagaatgttggaggttgccccagtgtctctatcgttacagtatctgaattctgcaagaagtctctctccttagaatgcctggggtcagcctggagtctctctcataaaaatgtcttaagacgcacagttgcccctatcacaagaatgcctaaggtcggcataaagtctctttcattaagatgcctggagttgcacaggtgtctctgtcattagaatgcctgcagtctgccaggagtctctatccttagactgcctggggtcagccaggagtctctcatattagaatacccagggtcagttgggagtatgttcacagacagaatgtttgtagtttttacagtgggatattcggtttttcactacactcctcaatttgttcagaaatgtccctcatagattctaaaaaaaagtgtttcaaacctgttgaatcaaaaaaatggtgtaactctttgacatgaatctaaacatcagaaagcattttcacaaatagcttctttctagttttcatcatgagatatttggtttttcactatatgcctcatacagtgaaatgtcccttcgtggattctatcaaaagagtgtttcaaacgtggtgaatcaaaacacaggtttcattcaatgagatgaatccacataccataaagcattttcgcaaatagcttgtttctagcttttaacatgggaagtttggtttttctttataggcctcaatgggctcagaaatgtcccctcatagattctacaaaaagtgtgcatttatagtgttgcatggaaacaatagtttgacactgtgagataagtccacacaacacaaagcattttcccagataacttctttctaatttttattgcaggatattctgttcattactataggcctcaagggactcaaaaatgtcccttcgttcaactacaaaaagagtgtttccaacctgttgaaacaaaacaaaggtttaaatctgtgaggtgaatccacacattgcaaagcattttcacacatagcttgtttctagtttttatagcaggatattcgttttttcactataggcctcaatgtgctcagaaatgtcccttcacagattttaccaacagagcatctttaacctggtgaagtaaaacacaggttgcattcagtgagattaatatacattttcgtagataacttgtttctcatttatatcacaggatattcaattttttactataggcttcaatggtctcagaaatgtttcttcatagattctacaaaaaaagtgtttccaacccgttgaatcaaacacaggtttaactttgtgagacaaatccacacattgcaaagcattttcacagatagcttgtatctagtttttatcatgggatattcagtttttcactagagacctcaatggtctcagaaatttttttttgtagattctacaataagagtgtttccaatgtagtggatcaaaaccaggtttaactctatgagatgaaccacacgtcacaaagcattttcacatatcgcttgttttgagtttttatcatgggatattcggtttttcactacaggcctcaatgggctcagaaatatgtcattgtagattctacaaagtatgtttccaaactgttgaatcaaaacaaaagtttaactctgtgaggccaatacccacacatctcaaagcattttcacagatacctcctgcctagtttttatcacgagatattcgatttttcaacatatgactcaatgcactcagaaatgtttctttatagactgtacaaaaagagtgttcccaaccaggcaaatcaaaatacacgcttatatctgttagatgaatgcacatattacaaagcttcttcacagatagcttgtttatagttttaattctgggatattcagttttttcactagaggcctcaatgggctcagaaatgttcctacgtagattctacaaaaagggttttccaacctgttgaatcaaagcacaagtttcattctttgagatgaatagacgaatcacaaagcattttcacagaaggttgtttccagtttctattgcaggacattcggtttttcactagaggcctcaaaatgctaaaaagtatctctgtagattctacaaaaagagtgttctgaacaatgttgaatcagaacaaaggtttaactctgtgagaagaatccacacattacaaagcattttcacagatagctgctttccatttcttatcacaggaatttcgggggtttttttcccccataggtttcaatggtttcagaaatgtttcttcgtagagtctacaaaaatagtgtttttaacctgttgaattaaaacaaaggcttaattctgtgagatgaatctacaattcacaaagcatttttgcagatagcttgtttctactatgtatcacgggatattcggtttacctttataggcctaactgggctaagaaatgtccctttgtctgttcaacaaaaagagtgtttcgaacctggtgaataaaaacaaatgtttaaccctgagacactcatccacactacacaaagtattttcgcagatagattttttctaggtttattgcaggatatttagtttttcactattggcctcaatgggttcagaaatgacccttcgtagcttctataacaagagtgtttccagcctgttgaatcaaaataaagtttgaaatctgtgagatggatccatgcatcacacagcattttcacaaatagattgtttctagatattaatgcaggagattcattttttcactatagtcctcaaggggctcataaatgtttctttgtagattctaccaaaagagtgtttcacccttgttgaatcaaaacgaaggtttaactgagtgagatgaattcacccattgcaaagcattttcacagctagcttgtttctagtttttgtcatgaagtattcagttgtccactatagtgtacaatagggacaaagatatttcttcatagattcttaaaatagagtggttccaacctgttaaatcaaaacaaaggtttaattctgtgaaataaatctacacatctcaaagcatttccacggatatcttgtttctagtttttattgcaggatattcagttttttgctataatctccataggctcagaattgtcccttcgaagatactacaaaaacaagttttttaacttgttgaatcaaaacataggtttaactcagtgagacgaatccacatattgcaaagcatttacacagctgttttgtttctagtttttattgtgggatattcatttttttgctattggcctcaatgggctcagaaatgtctctttgcagattctacaaaaagaaggtttcaacttgttgaattaaaacaaagttttaactctgcaagataaatttgtacatcacaaaattatttcacagagagctggtttctgctttttattgcaagagattcacttcgcaataggcctcaacgggctcagaaatgttttttcatagattctacaaaaagagtgttcttaacctgttgatttagaacaaaggtctaactctcgatgaatccacacatcaaaactcattttcatagtttgttttatattttaaaatgggatattagctttttcactacagacttcaattggctcagaaatttttttcatagactctacaaaaagaatgtttccaaggtgttgaataaaaacaaaggttatccctgtgagatgaatgaacgtatcacacagcattttcccacagaggttgtttctatttttgctcacgggatttttgatttttcactataggcttcaatgggctttgaaatgtccctttatataatctactaaaacagtgtttccaatttgttcaatcaaaacaaaggtttaaatctgtgacatgaatccacatattgcaaagcattttcacagatagctttgtttctagattttaaggtgcattatacctttttttactgtagtttttaatggtctcagaaatgtccctttgtagattctacaaaaaaagtgtttccaacatgttgaatcaaaacaaagcttcatctctgtgagataaatccacacatcacagagcatttttgcagataacttgtttctagtttctatcccgggatatttggtatatcactatacacctcaattggctaagaaatgtcccttcatgcattccacaaaagagtgtttccaaactggtgaatcaaaacacaggttccatttggtgagataaatgcatacatcacaaaaaatgttcacagatagcttgtttccagtttttattgacggatatatggcttcttgctataggcctcaatgggctcagaaatattccttcgtagattctacaaaaagaacgtttctaacctgttaaataaaaacaaatgtttaactctgtgagattaacccacacatcgggaaccatttacacggagagcttttcttctagcttttattgcaggatatacagtttttctctacaggcctcagtgggctcagaaacgtcttttcatagattctacaaaaagagtgatttcaacctgttggttaaaaacatagttttaactttttgagataaatccatacatcacaaagcattttcacagatggcttgtttctagattttatcaccagaaattagttttttaactataggcttcaatgggctcagaaatgtccctacattttttactgtaggcctcaatgggtcagaaatgtcccttcgtagattctaccaaaaaagtgttttcaaggtgttgaattgaaacaaagatttaactctgtgaggagaagccacacattgaaaaggattttcagagatagcttgtttctagttcttatcgtggaatattcaaattttacaatatgcctcaatgggctcagaaatgtcgcttcatagatttcacaaaaagtgtttccaacctggagaatcaaaacacaggttccattgggagagatgaatccacacatcacaaaacatttttacatatagcttgtttctagtttttaatgctggatattcagtttttcactataggtctccgtgggctcagaagtgtcctttcatagattctacaaaaagactttttcctacctgttgaattaaaacatagttttaaatctgtgagataaatgctcacatcataaatcatcttcacagatagattgtttctagattttaaggaaggatattctgcttttcactataggcctcaatggcctcagaatgtcccttcatagatgctacaaaaagagtgtttccaaggtgttgaataaaaatataagtttaactctgtgagatgaatccacacatcacaaagcattttcacacagggctcacttctagtttttatcatgggatattcagtttttcactataggcctcaacggactttgaaatatctttttgtagattcaactaaaagagtgtttttatcttgttgaatcaaaaaaaaggttgaaatctgtgacatgaatgaaaatattctaaagcattttaacagatagcttgtttctaaatattaaggcaggttgtttgatttttttactatagttcttgatggtctcagaaatgtccctctgtactttctacaaaaaaaagtgtttgcagactgtcaaatcaaaataaaggtttaattctgtaagataaatccacacattgcaaagcatttttggaaatagcttttttctagcttctattatgggatattttgttcatcactataggcctcaatgggctgagaaatgtcccttcatagactctacaaaaaagtgtttccaacctggtgaatcaaaacacaggttccatttggtaagaagaatccacacaccaataagcattttgacagatagtgtttttctgtttttcttcatgggatccttgatttttcactacaggctcaaaggggctcagaaatatcctttgtagattctacaaaatgagtatttccaacctactaaatcaaagcataggttccatccagtgagatgaatccacacattgcaaagcattttcacagatatcttttctctagtttatatcacagaatgttcagttttccactataggccaaaattggttcagaaatgttccttcatagattctgcaaaaagagtgtttgcaacctgttgaatcaaaacaaagctgtaactttgtgataggaatacacacacagcaaagcatttttacagatagcttgtttctagtttttatagcagaatcctcaaatttttactataggcctcaataagctcaattatgtcccctcatagattctacaaaaagagtgtttccaacttgttaaatcaaaataaatgtttaactctgtgagataaatgcacacaacccaaagcattttcacacaagcctgtttctagattttatcactagttttctgatttttcaccacaggcctaaataggcccagaaatgttcctttgtaatttttacaaaaagtgtgctttcaacctaatgaatcaaaagaaaggtttcactctgtgagatgaatccagacatcacaaagcatttccacagatagcttgtttgtaatttttattgagggatattcaatttttcactgtaggcctcaatgaggcctacaatttttcactgtaggcctcagaaatgtgcctgcacagattctacaaaaaaagtgattccacctgtaataccaacactttgggaggccaaggcaggcagatcaggaggtcagcaaatcgagaccatcctggttaacatgctgaaaccccatcttttataaaaatacaaaaaaactgccagttgtggtggctggcacctgtattctcagctacttgtgaggctgacgcaggagaattgcttgaaccagtgagccgagattgtgccattgcatttcagcctgggtgacagagcaagaccctgtccaaaaaaaaaaaaaaaaaaagaagaagaagaagaaaagaaaagttattccaaccttttgaatcaaaacgaaggtttaattttgtgagatgaattcacccatcataaagcattttctcagataacttgtttccagtttttcttgtggaaacctcagtttttcacaacaggcctcagaaatatctcttcatacattctacaaaaagagtgtttccaacctgttaaatcaaaacaatggtttaattctgtgaaatgaatccacacattgcaaagcattttcacagataggttgtttctagtttttatcatgggatatttcgttttcaccataacccagagagggctcagaaatgtcaactcgtagattctacaaaaagcatgtttccaacctgttgaatcacaacaatggtttaactctgtgagatgaatccacacatcacaaggcattttcataagtagttcttttttgtttatttgtttttattgcaagatatttggtttttcactataggtttcaaagggctgaaaaagtccctttagagacactaaaaaatggtgtttccaacgtattgaataaaaaaaggtttaactatgaaagaaattcaccaactgcaaagcattttcacagatagcttgtttctagttttatcacaggatccttggtttatcactgtaagactcagtgggctccccaatgtctttttgtaggttctacgaaaacagtgtttccagcctgttgaatcaaaataaagtttaattctttgagatgaatccacatatcacaaagcattttcacagatagcttgtttctagtttttatcatcagatattttgtttttcactataggcttcaatgcactcagaaatgttgattcttagattctacaaaaaagcgtgttttcaaacagatgaatcaaaacaaaggtttaactctgtgagatgaatccacacatgacaaaacattttcatagatagcttgtttgtagtttttatcatgggatattcgaattttcagcatatgcctcaatgggatcagaaatattcctgcatagattctataaaaatagtgtttccaaactggtgaatcaaagcacaggtttcatttggtgagatgaatccagccaccataaatgattttcacagatagcttgtttctacttattacagtgggatattctgtttctcactataggcctaaatgggctcagaaatttcccttcatagattttacaaaaagagtgtttccaatcagttgaatcaaaacaaaggtttaactttgtgagatgaattcacacatcataaagtattttcagagataacttctttctagattataagacaggatatttgttgttgttgctttgctatagacctcaataggctcagaaatcgccctatgtaggttatagaaaaaaaagtgtgtccaacctggtgaatcaagacacaggttttatttggtgagataaacccacacatcacaaagcattttcactgataccttgtttctagtttttatcacgtaatattcggattttgccaataggcctcaaaaagttcagaaatatcccttcatagattctacaaaaagagtatttccaacctgttgaatctaaacaaacgtttaactctgtaagatggatgcacacatggaaaagcattttcacagagagcttgtttctggtttatatcgcagaatattcaatttttcaccataggcctcaataggttcagaaatatcccttcatagattctacaagaaaagtgtttccaacctgttgaatataagcaagggcataactctgaaagatgcatccacagtctcaaagcaatttcacagagagcttatttatagtttttatcacaggatattctgtttttcactctagaactcaattggctcagaaatattcctttgtagattctacaaaaagattgtttccaacctgttgaatcaaaacataggtgtaactctgtgacatgaatccatacgctgcaaggcattttcacagatagcttgtttctagtttgcatcacgtgatatttggttaatcactataggcatcaatgttcttccacaaagaatgttcttcgtgcattccacaaaaagagtgtttcaaacatggtgaatcaaaacactatttccattctgttaaatgaatccacacatccaaaacagtttcctagatagcttgttttctagattgtattatgggattcttggtttttcactgtaggcctcaatgggctcagaaatgtctttttgtaggttctacaaaaagagcgtttttaacctgttgaataaaaacaaaggtggaactctgtgagatgaatccacacatcacaaagcattttcacagacagcttgtttctagttttttttatatatatagtccttaataggctaaaaacatcccttcataggttctacaataatgtttccaacctgttgaatccatgcaaagatttatctttgtgaaacaaattcacacactaaaaaacattttaacagatcacttgtttccagtttttattataaaatatttggtttcacatgataggcctcaatgggctgagaaatgttcattcatatattctacaaatagggtgtcaaaactgtggaatcaaaataaaagtttaacactgaatccacacatcacaaagcatttttacaaatagcttctgtctactttttattgcagggtattcagtttctcactgtaggcataaatgggctcagatatgtttcttcctagattctactaaaatagtgtttcacccttgtgagtcaaaacagaggttccattcgatgagaaaaatccacacatcacaaagcattttcacagatagggtgtttctagttttatcacagaatattcagttttccactgtaggcctcaatgggctcagaaatatttctttgcagattctgcagaaagagtttccaacctggtgaatcaaaacacagggtctattcagtgagatgaatccggacattgctaagcattttcacagatagcttgtaattcgtttttattgtgagacccttggtttttcacgtcaggcttcaatgggctcagaaatgtctctttttagattgtacaaaaacagtgttttcaatctgttctatcaaaccaaaggtttaattctgtgaggtgaatccacacatcacaaaccattttcacagatggttctttccagtttccatcatgaaatcctcgttgtttcctgcccccccaccccccccacacacaaacacacacacagagtcctcattgggttcacaaagattttctcatagattctactaaaaaagtgtttccaacctgttgaaccaaaacaaaggtttaactctatgagatgcttccacacatcacaaagcattttcacagacagaaagtttttagttttaatcactggatattctgtttttcactgtaggcctcaaagggctcagaaatgtcaattcgtagtttctacaaagagagtgtttccaacctgtttaattacaacaatggtttaactctctaagatgaatgaaaacatcacaaggcattttcccagatagcttgtttctagtttttattgtgggatattctgtttggcactatacacatcaatagactcagaaatgtcttatcatagattctacaaaaaaaagtatttccatcttggtgagtcaaaaataaggtttaactctgtgagatgaatccacacatcagaaagcatattcaaagatagctcgtttctagttttttattgcaagatattccattttttactataggcctcaatgggctcagatacatcccatcgtatattctacaaaaaagtgtttccaatctggtgaaccaaaacacaggctccttttaatgagatgcatccacacatcacaaggcattttcaaagagattgtttctagtttcaactgcagaatatttgtttttttactataggcttcaatgggctcagaaatgtttctttgtagattctacaaaaagagtatttccaatatggtgaataaaaaaaaaaaaagatttaactctgtgagatgaaagaacacattgctaaatattttcacagatagcttctttctagttttcatcatgggatattcagtttttcacgataggcctcaatgagctcagaaatgtcccttcatagattctacaaaaagagttctaatttgttgagtcaaaaaaagggtttaactgtgtgagataaatttacacatggccaactattttcacagatcacttgtttctagtttattttgtgggatattcagtttttcaatataagcctcaataagctcagtaatgtcccttcgtatattcttcaaaaagattgttttcaacctactaaatcaaaacacgagtttcatttggtgagatgaattcacacatcagaaagcaccttcacatgtagcttgtttctagttttgtttgcaggatattagatttttttgctatagacctaaaggagctcagaaatttctacaaaaaagttcttcccatttattcaatcaaagcagaggtttattttcatgagatgaatttgcacatcacaaatcactttcacagataacctgttttcggtttttattgcaggaaactcagtttttcactacaagcctcaatgagctcagaaatgtcccactgtaggttttacaaaaagaaggtttccaacctggtgaatcaaaacacagattcaattcactgagataaatctccactccagaaagcattttcacagatagcatctttttactttttatcatgagacatttgattttttactattggcctcaatgaggtcagaaatgtctcttggtagatcctataaaaagagtgtctccaacctgttcaatcaaaacaaaggtttaactctgtgaaatgaattcaaacattgaaaagcattttcacagatagcttgttactagtttttatcgtgtgatatttgattttttactcttagcctcaatttgctcagaaatgtccctttgtagattctattaaaaaaaaaagtgtttcttacctggtgaatcaaaactcaggtttcagtcagtgagatgaatccatacaccacaaagcattatcacagatagcttccttctagttttcattgtgggatatttgatttttcattataggcctcaatgtgcttagaaatgtccatttgtatgttctacaaaaagagtgtttccagcctgttgaatcaaaagattgatttagctctgtgagatgaatgttcacattgcaaaccactttcacagatagcttgtttgttgtttttatcatgggatattcagtttttcactagaggcctcaatggactcagaaatgccccttcatagattctacaaaaaaagtgtttctaaccctttgaatgaaaatagagttctaactctgtgaggtgaacccacaatttacaaagcatttaatcagagagcttgtttcttgtttttatagtgggatattcagttttttactataggtttcaaaagactcagaaatgtcacccagatgtttctatcattagactgtctggggtcagtcaggagtctctcccattagaatgcctgctgttgctcaggagtctgtataattagattgcctgttgtcggccaagagtctctttcatcagaatgcttgggatcatccaggtgtctctattcataggacacctgtgttcaccagcagtctctctattagaatgcttggtgttggccaatagtttcttgaattagaaggcctggggtcacctaggtgtctctattattaaaatgctttgcctcacccacttttcttcatcattagaatgctggggttgggccaagaatctctcccattagaattcctatggtttcccaggtgtctctatcactagactgtttgtggttactaggagtctctttttagaatgcctggggtttgccaggagtctctaaaattagaatgcctggagtctcccaggtatttcaatcgtaagactgcctggggtcagccaaaactctctcccattaaaattcctgtgctcttccaggtgtttctatcattagactgcctgtggttggccaggagtctctcccattagaataccttgggtcaccaaggtgtctatataggctgcctgatttcagctggaagtctttctgattagaatctctggtgtcagctggggttctccgctattagaatgcctggggccaccctggtatctctttaattagactgcttgttgtcagccaggagtctctttaattagaatgcttggaattgcccaagcgtctgtatcattagatggcctggggccagccaggaatctctcccatcagaatgcatgaggtttgctgggaatatctaaagttagaatgcctgaggtcacttaggtgactctatcattagaatgcctggggtcagccgggagcctctcccattagaatgcctggggttgttcaagtttcactatcactaaaatgcctggggctgactggggtctctcccataaaaatacctgtggacagccagatatctctatcattagactgcctgaggtcactcaggagtctctatcatttgattgccaggggtcagccaggaatctctcccattaaaatgccttgggtcgttcaggtgtctttatcattagaatgccaggattggggggcctctctaataaaaatacctggggtcgctgaggtgtctttatcattaggctgcctagggttgccaagatgtctttatcattagaattcctgagttcagccaaaattctctcccattagaatgcctgtggttgcccaaatgtctttatcattaaaatgcttggggttggccaggagtctctcccattagaatgcctatgatcacccgggtggctctatcattagactatctgaagtcggccagtagtctctttcatcagaatgtttgggtggcccaggtgtctctatcattagactgcctggagttggtctggattctctccagttagaatgcctgggttcgctcagctgtctctatcactagaatgcctggggtcatgcaggagtctcttctattagaaagtttggggtagcccaactgtctttatcattagactgcctggggttggccaggagtctctctcattagaatgcctggagtcacccaaaaatctgtataattagactgcctggggttggccaggagccttttcctttggaatgcttggggtcacccaggtgtctctatcattagactgcctgggtttggcagaacgtctctcccattagaatgcctgtggtcatgaaggagtctctatctttagactgcctggggtcagacaagattctctcccataagaatcactgggtttggccaggaccctctcctatcagaatgcctgaagctgcctagatgtctccatcattagactgcttcgggttaaatgggaaattctcccattagaatgcctgggttcacccaggtgtttctatcattagactgcctgggtttggccaggtgtctctttcatcagaatgcctggtgctggccaggagtctctcttatttgagtgcctggtgtcgtggaggtgtctatatcattacaatgcctggggccactcaggtgtctctatcattaaaaagcctcaagttgaccaggagtttctctcattagaatgtctgtgttcacccagttgtctctatcattagactgcctggggtcggccgggagtgtctgtcattagaatgcctgcagtcgcccaaatgtctccgtcatcagacttcctggagtcagcagggagtctctaccattagaatgcctgaggtctctcaggtgtctctataattagattacctggggtcagccaggaatctctcccattagaatgcctggagtttcccaggtgtctctatgcatagactgcctctttcagccagaagtctctcccagtagaatgcctgggttctgctgggagtctccccttttagaacgcctgaagacacccaggtgtctctttaattagactgcctggggtcagccaggggtctcttccattagaatgcctgtgctcgtcaaggtgtctctatcaataaactgcctgcagtttgccaaaagtctctcacattagaatgcctggggtcaagcaggtgtctctgttattagcaagctttgggttggccaggagcctctcctattaaaatgcctggagttgagcagaagtgtctcccattagaatgcatgtggtcgcccatttgtctctatcaatagactgcctgaaattagacatgggtctctcccactagaatgcctggggtcgcacaggtatctcaatcattagatttttggggttggctgagagtctctcccattagaacaccttcggtcacccaggtgtttgtttcattagactgcctggtattggctgggagtctctcccattaaaatgtctggggtctcccaggtgtctctatcaatagactgcttgggtccgtcagaagtctctcccattaaaatgccttgggttggatgggagtctctattattagaatacctttgattgcccaggtgtctcttatcagattgccttaggtcagctaggagtctctctcattagaatgcctgtggtagcccaagtttcactttcattagactgcctatggccggccaaacttctttcacattagaatgcctgggatcgccagctgtctctatcattagactgcctgtggtcagccaaaagtctcccattaaaatgcctggggtcccctaagtgtctctatcattaaactgcctgggttcgttatggagtctctcttattagaatgcctggagttacccaggtttctctatccttagactgcctgaagtttgacaagagtctctcccattagaatcactggggttcaccaggagtctctcacattagaatcctttgcattgcccagatgtctctatcattacaatgattggggtggcccacttgtcttcatcattagaatgctggggttcagccaggagtctctctgattagaatgcctaggtttgcctggggtcacttagttgtcccttatcttgactgccttggttgcccaggtgtctctatcattagactgcctggagttgcacaggtatctctatcattagaatgcctggggtggtccaagattctttcccattagaatgcctggggtcacccaagtgtctctaacatcatagtatctggtgtcaactgggaatctctttcattagaatatttggggtcgcccaggtgtctctatcattagactgccttgggtagccaggagtctctcccattagaaggcctgagtttgcccaggtgtctctatcattagactgcctgggatcatcctaatatctacctcattagaatgcctggtgtcagccaagattctctcccatttgagtgcttagagtagcataaatgtctctatcatgacaatgcctggggcatccaggtttctttctcattacaatgacttgagacgaccagtattctatcccattagaatgcctgtggtctccaggtgtctctattgtaatactgcctggggtcagatgaaagtgtctcccattaaaatgtctggggttgctcaggtgtctctattattagacagcctggggtaggccagaagtctcctccatttgaatttctgtggttgtccagtgtctctatcattagacagcctgtggtctcccaggagtctctccatcagaatgcctggtaatgaccaaaagtctttcacattagagtgcctggggttgcccaggtgtgtctaccattaaaatacttgaggttgcccagttgtctctatcattagaacaccaagattctgtgggaagtctctcccattagaatgcctaggtttgcccaggtgtttctatcattagactgccttgtgtcatccgggagtctctcccattagaatgactggggtcgccaatgtgtctctatcattagaattcctggggttggctgggggtctctcctgtaagaatggctggggtcacccaggtctctctaacattagactgcctggttttgcacaggtgtccctaagattagaatgcctaggatcgtcagggagtctcaaccaatagaatgcccatggtcacccaagtgtctctatcattagactgcctagggtcagcttagagtctctcccattagaatgtgtggggtcacccaggagtctatataattgaactgcctgagtttgaccaggagtctgtctcattagaatgcctgggatcactaaggagtctctatttctagattgccaggggtcggacgaaagtctctcattagaattaatggggttgcccaggtgtctctataattagactatctgggttaggccaggaatctttcccattagaatgcctggggtcgtttaggtgtctctatgcgtagactgcctggagttggccaggattcactcccattagaatgccttctgtcacctgaaagtctctcctattagaatgcttgggggcacccaggggtctttttaattagactgcctggggtcgtccaggactccttctcattacaatgcctctggtcgcccagttgtccctatcaatagactgcctggggttggcctggagtctcttccattaaaatgcctggggtcacccaggtacctctataattagattgcttggggccatccaggtttctctttcattgggatgcctgtgattgcccatgtttctctaaaattagactgcctggggtcggccagtagtctctcccattagaatgcctggggtcacccaggtttctctataattagactgtgtggggtccaccaggaatctctcccattagaatgcctgtggtcacccaggtgtctcatcaacagactgcatgggtcagccacgagtctctcccattagaaagtctggtgtcagctaggagtctcttttatttgaatgcctggggtcattcacctgtctttttaattcgactgcctgaggtcacttaggaatctcttccattacaatgcctgaggtcgcccaggttgcactttaattagactgtctggggttggccaggagtctcttttattagaatgcctgtggtcaccgaggtgtctctatcattagactgcctgtggtcagccaggtgtctctccattagaatgcctgagtttagccaggagtctctcacattagaatgcccgtggtcacccaagtgtctctattattaaaatgcttggggccacccacgtgcccctatcattagcatgccagggttcagcctggagtgtctcccattagaatgcctgaggtcgcccaggtgtctctatcattattctgtctggtgttggcttgggtgtctctcccattaaaatacctagtttcatccaggtgcctctatcattagaatgcctgtggttggctggaggtctctcccataagaatgactgtggttgcccagttctctctatcattagactgcctggggtcacagaggtgtctctattattagaatgcctaaagtcttttgggagtctctctcattagaatgcctagagtagcccaagtgtctttatcatcacactgcctggggttggttgggagtctctttcattagaatgcctggggtgtcccaggagtctgtataattagactgactggggtcaggaaggagtctctcccattaaaatgcctggggtagaccaagtgtctctatcattagactgcctaggtactgccaggagtatctcacattagaatgcctggattggaccaggagtctatccctagactgcctgaagtcgaataatagtctctcaccttagaatgactgaggtagccagaagtctctccaattagaatggctgggttcgcccaggtatatttatcattagactgcctggatcttcctggagtctctctcattagaatgcctggtgtcagtcaagagtctctcccatttgaatacctggggtcacacagatgtctctatcattacaatgcctggggtcacccaggtgtctctataattacaatacctcgggacgatcggtagtctctcttattagaatgccttcggtcaccaggtgtctctatcataatactgcctggggtcacacaggagtatctcttattagaatgcctggggttgcccaggtgtttctatcattagactgcctggagtcagctagaaatcttccccattagagtgcttggggtcacccatgtgtctctacccatagactgcttgggtcagccaagagtctctcccaggtttctctctcattagactgcctggtgtcagacaggagtctctctcaatcgaatgcctggtgtcaacggaaagtttctcccattagagtgcctgggttctcacaggtgtctctatcattgcaatgcctgggttgcccatgtgtccctatcattagaaagcctcatgtctgccaagagtctcccgcattagaatgcctgcaatcgcccaggtgtctctattattagatttcctagggctggccaggaatctatcccattagaatgcctggggtcccttaggtgtctctatgcatagattgcctggtgtaggccacgagtcacttccattagaatgccttgggccggctaagtctctcctactagaatgcctcaggtcacccagtggtcattttaattagactgcctggggtcgtccaagagtcgttattattagagtgtgtgtggtcacccagaggtccctatcaatggactccctgggttcagccaggagtctctcccattagcatgcctggggccacccacctttcacttcaattagactgcctgtggttggccaaaagtctctcacattagaatgcctggggccacccagggttttctatcattagactgcatgtggtcagccaaaagtttctcccattaaaattcctgaggtcccccaagtgtctctattattagactgcctgggttcggctgggagtctcatattagaatgcctacagtcacccaaatttccctatccttagactgcctgaagccagacaagagtttctcccattagaatcgctggagcttgccaggagtctctcacattagaatgtctggggtcactcaggtgtctctatcattaaaatgattggggtggcccacttgtccccatcattagattgtcagggtttggccaggagtctgattaaaatgccttgggtcgcctgggagtctcttttattagaaagcgtggggtcgcttaggtgtctcttatttagactgcctggggtttcccaggtgtctctatcattagactgcctggggttgcacaggtatccctatcactagaatgcctgcggtggtctgagagtctttcccataagaacacctggggtcacccaagtgtctctttcatcacactgactggtgttgtctgggagtatctttcattagtgtctctaacattagattgcctggggtcgttggggagtctcctccattagaatgacttgggtggcccaagtacctctatttttagactgcctggggtgggctgagagtctctcctattagaatgcttgtggtcgcccaggagtctgtataattgagcttcctgggttcgaccagggctctctcccattagaatgcctggggtcgcccaggagtctctatccttagactttcagatgtcagatgaaagtctctttcattagaatgcctggggtcgccaaagtgtctctataattagactgtctgggttcggccaggtatgtatttcattagaatgcctggggtcgcttaggtggtctgtatgcatagactgcttggagtcaaacaggagtcactcccaatagaatgctttcggtcagccgaaagactctcctattagaatgcctggtggcacccaggggtctttaattatactgcctgaggtcgtccaggcgtctttctcattacaatgcctagggtcacccagatgcctctatcattagactgtctgtggtcatccaggagtctctttcactgaaatgcctgcggttgcctatttgtctctatcattagactgcctggggtcagcctagcaataaatgaaagtttaagctatactaaacccagggttggttaatttcatgccagccactgcggccattagtctctcccattagaatgcctggggtcacccaagtttctctataattagactgtgtgaggtcagccaggaatctctcccattagaatgcctccagtcacccaggtgtctctatcaacagactgcttgggtcagccaggagtgtctcccattagaatgccttgggtcagctaggattctctcttatttgaatgcctggggtcgcccaggtgtctttttaataaaactgcatgcagttggccaggagtctctcccattagaatgccaggagttgcccatttgtcactttaattagactgcgtttagtcggccaggagtctctcctattaaaatgcctgtggtagtccaggtatgtctatcattagactgcctgtgcttagccaggaatctctccattagaatgtctgaggttagccctgagtctgtaacattagaatacctgtggttgcccaggtgtctctatcattgaaatgcttggggttgcccacttgtctctatcattagaatgcctggggtgggccagaaatctctctcattagaatgcctgttgtcacccaagtctctatccatagactgcttgggttggccaggagtctctcccattaaaatgtctgggtctcccagtttctctatcattagactgtctagggatgactggaagtctctcccattagaatacctgggttgcccacgtgtctctattgttagactgcctggcatcagacaggagtctctcattagaatgtctgatgtcaaccaaaattctctcccattagaatgcctggggtctcactggtgcctaaataattacaatgcctggggtctcccaggtttctctatcattagaatgcctcgggttggcagagagtctcttgcattagaatgcctgcaatcgcccagttgtctctatccatagactgcctggggtcaaccgtaagactctcccattataatgcctggaatcgcccaggtgtccctatgcatagaccgtctggggtcggccaggaatctctcttattagaatgcctgaggtcgcccaggtgtctctatcaataaactgccagaagtctcccccattagaatgtctgagattgggtaggagtctctcttattttaatgcctggggtcacccaggtgtctatttaattagactgactggggtcggccaggggtctctcccattagaatgcctgggatcacccaggtatctctatcattagactgcctatgcttagccagttgtctctccattagaatgccagaggttggccaggagcctctcacattagaattcctatggtcactcaggtgtctttatcctgaaaatgattggagccacccacttgtctctatcatttgaatgccaaggtttggcctcgagtctctcctattagaatgcctggggctgcctaggtgagtctgtcattatactgtctggggttgtttgggagtctcttccattaaaatgcctggtgtcacccaggtgtctctatctttaggatgcctgtggtcggctgggggtctctctcattagaatgcctggtgtcagccaagaataactcccatctgagtgcctggggtccacaggagtctctatcattgaaatgcctggggtcacccaggtgtctctgtcattacaataccttgggacgaccagtagtagtctcttccattaaaatgcatggggtcaccaacttgtcactttaattagactgcatggggttggcaagcagtcgctcccattagaatgcctgcggtcaccggtcaccaaggtgtctctatcattagactgccttgggttggttgggagtctctcccattataatgcctggtgttgcccaggtgtctctatcattagactgcctggggttagataatattctcttcattagaatgcttgggtttgcccaactgtctttaatatttgaccacctggggtcggccaaaagtctcccttattagaatgcctggtgtcagctgggagtctttctcatttgagtgcctggggtcgcacaggtgtttctatcattaaaatgcctcaggtcgcccaggtgtctctattattaaaatgcctcgggatgactgagagtctctcccattagaatgcctgtggttgcccaggtgtctcaatcataagactgcctgaggtcagatgggagtctctcccattagaatgcctggggtcacttaggtgtctctatcattagactgcctgagttcggccaggaggcttttccattagaatatctgggatccgccggcaatctttcccattagaatgtctgggttttgccaaaagtttatcccattagattgtctggaatcacccaggtgtctatatcaccagactacctggtcgactggaagtttctcacattagaatgccttgggtcgcccaggtgtctctatcattagactgcctggggtcagctgggagtgtctcccattagaatggctgaggtctcccatgtgtctctataattagacagcctgcctggggtcagccatgagtctcaaaaaaaaaaaaaaaacccatggctaccccaggtttctttatccttagactgcctagattcagccaggagtctctttcattagaatgtctgttgttgcccagatgtctctactcttagactgcctaggttccatcaggggtatctcccattagaatgtcttgggtcagccagggtctctccctttaaaatgcctggggttcatcaggggtccctcccaatagaatgtgttgggtaacctgggagtttctccttttaaaatgcgtggagtcccccaggtgtctctatcattagaatgcctgggctcaaccacgggtgtttccaataagaatgcctgtggcctcccagtgtctccatcattagattgcctgcagtcagccagggttctctcccattagaatgcctggggttgcccatgtgtctcaataattagactgcttgcaatcagcaagaagtctctcccaagagaatgcctggggttgagttggagtctctcccaataggaaggctgtgttctcccaggtgtcactattattagaatgcctggggtcagctagaagactctcacattagaatgtctggtctcaccgaggtgtctctatcattagacggcctctggttggctggtagtttctcctattagaatgcctgggatcatctggatgtctttaccattagactgcctggggttggccaggagtctctcccatttgaatgcctggggtcggctgggagtctctcccattagaatacctggggttgtccaggtgtctctatcattagactgccggggttggcctggagtctttcccattagaatgcctggagtcgcccaagtttctctgagactgcctggggttggccaggagtctctcccactagaatgttcagccaggagtctctttcattagaatgcctggggttgcccaggtgcctctatcattagactgcctggattcagccaggagtctctcccattagaatgcctgctgtcactcgtgtggctctattattagactgctggggttggcctggaatctctcccatttgaatgcctggggttgccaagatgtctctatccatagactgcttgggtcggcaaggagtctctcccgttagaatgcctttagtcggctgggagtctctcccattagaatgtttagttaagcccatgtttcactttattagactgcctggggtcacccaggagtctctcccattagaatgcctgggttgcccaggtttctctatcattagactgcctgtggtcagccaggagtctctccattagaatgcctggggttggccaggagtctctcacattagaatgcctgtggtcgcccagttgtctctatcattaaaatgcttgggtttgcccagttgtttctaccaacagaatgccagggtttgtcccagagcctctcccattagtgtaggggttcagtcaagatgctggggaaaactataaaacacaaacattcttggaaggccagggggttttgtatagcttcaaatactttgtctgaaggtggcctaatcctctttgaactatagcaagggtaattaatataggaacatagagtagttaacctaaatagcttgtttacttatgtggtcctaaaactaacctctgatcatccactggtgcatgattgctctctactcgggggttcagcaacaataattaccttctagtggtgtttacctgagacttctgtcattaaatgtgtgctaaataaatgccgggagggccaacaagtcagagccgtggctgacaggactcttcttggagtctgtaagtggcctggatgctcagcaggactgacaagcataagatctgtgtcagtgtacattattcatccgtcgttgagtcagggtctgcaggacaaacccccgcaggtggtgaccccgacatgatcaaggcagtgaaggaagcgcgatggacaccctgaaaacgaaggtgaaaaaggaaccttgtcatcagcgagcaatcagtaagtcattggtgcccactcaggatctccaagttcaggggagattgttcaggctgaggtttcatcatgagacaacagttatcagctcaacagaaacagtacataaaagtgttgaaacagctgcttaaggctagtggagcctcagttttgcaggctcaattaaatgacctaatgcaaactgttataagccaaagcctatggttcccagaaaaaggcacgctagacataaagctctcggaacaagtggggagaaatcttaaacagcattatgcacaagggcaatgagtcccagtaacacctctagcgctatgggctgtaattaggctggaccaggctccattatacacagaagagcctaaaaaggggaaggaggaaccgtaacctgcgttaccacctccttttccttcagcccggatatatcaccgggccagaataacaaaaaggaaacggggtttttcctgagccacctcctccaagagataggaaaaaggacaggagacacgctacacctatgagaccctgtctaatcaagcggcattagaaggggagcttttagcctgcctggtaatgcaaggtcagcaaggcaatcaggtacctaaagggttaagaaaaagcattagaggccagagtgctgcggtcaagcatgcagtaaatagaaagcaaacactgccagcaaatgctccccaaaacttggcctgcgtagcagctgtgttgacgaaaagccaggtccagtgcaccagagcggcctgctactgaggggcagaaggtgtgcgcgggaaggctcacccaacctgcagcagccacccggtggcgggaggagggagcggcacacgcagaaagaagcggtgcagacaagaagcggcagggcctgagcaagcacatcgcagccgctgcccccggacctgcccgctcagctctacagctccgcaggcggcccacgacaaaatttcatgtgtttattgtatacagagacgtcccaaattataattctctgctaagatttaagtaaaatttaagaatttaaaagacctctttctgataatagccactgttatctcttgcttgcccctagcgtgactctctccacatctaattaaaataaaactgtaacctctgaatgagagaaattacagagggcccatgaattagttggagagcaattgaaagctgggcatgttgaattatctagcagcccttagaattcacccattttcatcattccccaaaagtctgggaaatggtaactttttcatgacctacgtgctattaatgccaatttgcaacctgtgggaccccttcagcaggggctcctttcgcccagggcaattcctcaagattgcctataattgttattgacataagacattcttttatatgattcccctagcaggacagagaaaaaattgcgtttacaataccagctatcaataacgaaaagtcagcttgttgatttcattggaaaatccttcctcaaggaatgctaaacagtcccaccacgtgtcagtatcatgtaaatcaagctttgctcccaagtagaaaagaatttcctgattgcacaaatattcattttgtggatgatattctactagaagctccaaaggagccaatattttaaatttatattcctctgtcataaagaatacacagctaagaggtctaatcattgcacctgggaaagtacagatttcttctccttggaaatatgttgggtacatactaactgcctggtgagtaaaacctcagaagtttaaattaaataccagcaacttacataccttaaatgattatcaaaaattactgagagatattaaatggcttcaacccacttcgggaattcctactgataagctatacaacctgttttctatcttaaagggcaatccagccctggattctcccagatatttaacccctgcagcagaaagggaaatcgaggaaatagagcaagccacctctcagaggcagctaaatcgcattgattcaccttattcaattaaattgtttatctttcccaccaaacactcccctacagggttaatagggcaaatagcccccaggccacacttcctagaatgggttttttgctcacataccgggactaaaacgctatctccctatattcagttcattactaaagtcatctattcaggctgcaaacgatgcaatcagctgctaggttatgatcctgatatcatcaggattcctttaagtaaaaagcaatttgaagcagtattgcgcttatcaatatatctgcaaatagctttctctgattacacaggacaaatagagcatgaacttcctgctaataaacttcttcatttcttatctcatatgccagtaatcttgcccacaaaaatagtttactcccccatacctaatgctttaacactatttactgatggttcctgtaaacatggaaaagtgacagtctggtggagaccacatcattcagtcactcaatctgggcttactagcactcagagagctgaaatggggccctgatactggtcttggaaactttttccactcagcctatcaatatagtgagtgactcagcttactttgtttatttattgcagaaccttaaaacagccttaattaaatccaatcttgagcccatcctgtgtgctctttttcttcaacttcagcaattactagatctaagtacacatcctatttttatcacatgcattggagcccacagctctcttcctggcccattgacttatgaaaatgaacaagttggccaggcgtggtgaatcacgcctgtaatcccagcactttgggaggccgaagcaggcggatcacgaggtcaggagatcgagaccatggtgaaaccccatctctactaagaaaaaaataataataataatacaaaaaaaattagctgggcacggtggcggatgcctgtagtcccagctactcgggaggctgaggcaggagaatggcatgaacccgggaggtggggcttgcagtgagctgggatagtgccactgcactccagcgtgggtgacagagcaagactctgtctcaaaaaaaaaaaaaaaagaaaaagaaaattaacaagttgatccagaagtcatgacatcactgcttgaccaagccaccaaatcgcatcaatttttccaccaaaattggagaaatttatctaaacaatttcaacttacccagagactggctaaacaaattatcctgcaatgcctggattgtcagctcacaagcacatcccctccttccacaggtattaacttttgaggactagaaccccaacactcacttaattagtgcacatgctctgcctggaaagtcaactcgatatgtcattaaacatattttaacttttgcatttatgggactgcccaccaaaattaaaactgataatggtccagcttatgccagctcacaatttcaacaattttgtcacacatggaatatccaatattccacacgcatcccatatatggacaagccatagtagaacgtgcccactccatcattaaaaatatgctcaaaaaacagaaaagagggagtatgggtaaagttcttgtaatgttattggcacaagtcttatttactcttaagttttaaaatttagatgacaaagttcaatcagctgcagaaaagcactttgcaataacctcagaagacataaaacctgcagttttatgggaagatgtaaacagaaacgaatggtatggtccaaatgaattgttaacgtggggaagagggtatgcttgtttttccacaccctcaggtcctctttggattccagcacaatgcattaaaccataccatggtgtggctaggacacaacccagtaccagaaatggagaaaattgcctggcttagcttctgagatcagacagaaacatattggctaaagttaaaaaaggtatcgtccagtttttttgtaaaccagacttcaaaataaagcacaacaggtttttcttaaagcactaacctgctctttaacaaagattataaaaggtctcttagcacaggcaccacccctagaatttccagtacactagcacgagcctggagactacgtcctcatcaaatgatggaaagaagaaaaaacccgagccagtctaaaaaagaccctacaggacctgcagccccagacgatgcagcttccatggatgatgcaggccccagacattatgctgaagaggcataaggctaagccaaataatttattcctttttaattctctcactctgcctgcaaccagtacttgctacactctattaagctcatctctgaaatccacccttttttatgccctgttacttaacaaacacccccttcagagcttctaacagtgagactgcttggctaaaagaaattaacattctcccggtggggttcctcattgatggcatagagtgaactgagatgccaagtaacactatgggtcactctttgactggaaaataatgttgctaattataatcatgattacattatgtgatttgctaattctaggatgcaaagccggaataaaagcaatggctgccatgccttacaaacctgttgctgcatacatctgcattctccaatcaaaaagacctaatgcagaaaacagaaaagggggagatgcagggtttcagtcaggataggtgggaaaattataaaacataaaccttcttggaaggccaggggggtttgcatagcttcagatagctttgctgaagatggcctaatcctctttgaactatagcaagggtaactaacataggaatgtagagtagtttatctaaatagcttgtttactcatatggttctaaaactaacctctgaccatccgcgggtgcatgattgctctctactctgtggctcagcaacagtaattaccttctagtggtgtttacttgggacttctgtcattgaatgtgtgctaaataaatgctgggagggccaatgagtcggggctgtggctgacaggactctccttggagtccgtaaatggcccagacatttggcaggactgacaagcataagatctgtgtcagtgtatgttatttattcgttgttgagtcagggtctgcaggacagaccccagcatattagaatgcctggggtcacccaagtttctttatcattagactgcctgggttcgggcaggagtcttttattaaaatgcctcagttggccaggtgtctctatcattagactgcctggggtagcacaggtgtctctatcattaggatgcctggggttgtccaggagtctttcctattagaatgcctggggttgcccaggtgtctctatcatcacactgcctagggttggccacaagtctcttctattagaatgcctaaggtcgcccaggagtctatataattagactccctggcgttggccagaagtctctctcattagaatgcctgagatcacccagatgtctctatccttagactgcctggacttggccaggagtctttcttaataaaatgcctggagtcatccaggagtatttatccttagactgcatggggtcagagaaaagtctctctcgctagattcactggagtttgccgggagtccctcctattataatgcctgttgttgctcccagctgtttttaacatttgaccacgtggggtaggccaggagtctctctcattagaattcctagtgtcagctgggagtctctcccatttgagtgtctggggtcgcccaggtgtccctttcattacaatgcctcagggggaccaggagtctctcccattagaatgcatgtggtcgcccaggtgtctctattataagactgcctggggtcggatgagagactctcccattagaatgccaggggttgcttaggtgtccctattattagactgtctggtgttggctgggagtctctcatattagaatgcctgggattacccaggagtctctacccttaaagtaatggaaattgatgaggggtatctcattagaatgcctgggatcagcgagaagtctctcccattagaatacctgaagtcacccaggttttttataattagacttccaggggtcagccaggaatctcacccattactatgcctggggtcccccaggtgtctctatgcatgcttgtttcagccagaagtctctcccagtacaatgcctttggtcggctgaaagtctctcctattagaatgcctttggtctcccagatgtctctttaattaggcagcctttggtcagccaggagactttcccattaggatgcctgcagtctcccaggtatcactgtcattagaatgctaggggttggccaggagtctctcccattagtatgtcttgggtcactcagctgtctctctcattagactgtctgtggtcagccaggaatctctattagaatgccttgggtcacccaggtgtatttatcaatagactgcctggggttggaccggagtctctcccattgaaatgcctgaggtcagaggggaatatcttcctttagaatgcctgtgtttgcccagtagtctctatcaatagactgcctgtggtcagccgggtgtctctcccattagaattcctgcagtcacccaggtgtctctgtcattacactccccggggtcagccggaaatctctcccattagaatgcctggggtcacccaggtgtctctatagttagactgcctggcatcggccaaaattctctctcactaaaatgcctgtggacacccagttgtctctatccctagactgctttcttcagccaggagtctcttacatttgaatgcctgtggtcgactgggagtctctgctgttagaatgcctggggtctcccagctgtctctcattagactgcctggggtcagccaggattctctccattagaatgcctgctgttgtgaagtgtctctatcactagattgcctggaatcgcccaggtgtctctatcattagaatgcctagagtcagccagcagtctctttcattagaattcctgggttggccaggagtctctcacattagaaggcctggggtcactaaggtgtctctatcattaaaatgcttggggtcacccacttttctctatcattagaatggctgggctaggccaggagtctctcccattagaatgcctggcattgcccaggtgtctttatcatttgactgcctcggttggaccaggtttatctatcattggaatccttgggttcatccaggagtctctcccatgagaatgcctggggtcagccgggactctctactactagaatgcctgaggtcgcccataagtctctatcattaaatggcctagagtcgaccaggaatctttctcattagaatggctgcagttgccctggtgactctatcattagactgactggggttggccaggaatctctcccattaaaatgcctggggttgcccaagtgtctttattgttagactccctgtgattgtcccggagtctctgccattataatgccatgggttggccaggtttctctcccattagaacacctggtgttgcccaggtgtctctatcattagaatgcctgggctcaccctggagtctctttcattagaatgtctgggatcagccggcagaatttttcaatagaatgtctgggttttgccaaaagtctctcccattagattgtctggaattgcacaggtgtctagatcataagactacctgggtcacccagaagtctctcacattagaatgccttgggttccccatgtgtctctatcattagactgcctggggtcagccaggaatctctcccatcagaatgcctggggtctcccatgtgtctatataattagacagcatgaggtcaagaaggagtccctctcaaaagaaatgccttgggtcacccaggtttctttctccctagactgcctggatccagccagtagtctctttcattagaatgcctgtttttacccaggtgtctctatttttagactccatggggccggtcagctgtctctcccattagaatgtcttaggtcggccaagagtctctccctttaaaatgcctggggtcgctcaagtttttctatcattagaatgcctaaggtcggctgacagtctctcccattaaaatgcctggatttgcccaactaagtttggcatcggatctctcttacaagaatgcctgtggtcgcccaggtgtttctatcattagactgcctgtggtcagccaggggtctctcccattagaatgcctgggattgcccatatgtctcaataattagactgcctgcgatcagcaaggagtctctttcaagagaatgccttgtgttgagtgggagtctttcctattagaatgactgggatctcccaggtgtctctatcattagaatgcctggggtcagctgggagtctctcctattagaatacctgggctcgcgaaggtgtctctatcattagacagcctgaggttggctggtagtttgtttcattagaatgcctggggtggtccggatttctttacaattagactgcctggggtcagccaggagcctctcccatttgaatgcctggggtcagcagggagtctctcccattaaaatgcctggagtcacccaggcgtctctctcattagactgcctggggttagcctggagtctttcccgttagaatgcctggggtctcccaggtatctctatcattaaactgcttggggtcggccaggaatctccctcattagaatgcctgaagttgaccaagtgtctcccccattagaatgcctgttgtcacccaggtgtctctatcatcaaactgcctgggttcagccaggagtctctcttattagaatgcatggggtcgcctacatggagccattgaaaggaacaacacccttgatgcagaagatttagcaccactatctctgttccatctgggcttatatgtacttttactttttggtggtgaaattggctgatgattttcctttttcttccctggactattgtgccaactgccaggctgcctcctgcccttacagccctaaatggctgccttctttccatcaactcccaacttcttccagtgaaatttaattgtctcaatgcctccccctcccccattctctccattttctcccaagaagcatgactcgattatttgcatattttgagaaactgctgcagattagttctttttgccagttctccctggaactcctggccttttgtggagggaaggatggacagaatgggaatcttcactagaagccgtgggaagaattgcaagttacatgctctatatgcaatgtccagcagtctgataaactgatgattcttaatcaagattgttttcctggtggggaaggggcttttattttcttttagagaggggaaagtgtgagctcttcccttattcctaatggctatttttgaagcaaagaaggctagcaacgttggcacatgccacctggcaaaggacccttgagtaagtgaaggtctcctagaactgggattaagaaaccttgctgtcctcacctccaaggcagggaccatcaagaacctacagactccatctcttctgcaagcctcatgccaagcctgggctattgctgctgccccttaaacagaggctgtccttaacccacctctcctgccctgtgatatgtctgttgagttggcctggccatgtccaagaggctgtagaaaggggagaatgtcaaggaagacttttggttgagaaggagcagaaagatgtgtttttgcaaagaagaagacctctaggaagagctagtaggaatgtacatgaagaaattaagtctgaaactggcttcctcactcccctgtttctccttttcctatccttataggcctgtcccttgcctctgccctggattggctggcacactaaaggacttgatgtacataactcctgtcccttttacccttacaaggtgcggattgcccctggctttgcctcttctttgtgcctttggcctggggtgcatttccacccacccttccatgtgcctttctttgcctctgcagtctcatttctcataattttgcaaattacattttgttgctttcttacctactattggccctaaatagcagaaagaagagaagtgacctagagaacctcagattcttcattgaggattggtatagccatgatttcagccatagcaagttttgctcaacagcatatgcgtgggattttgcaaaactcctattctgatgaatcacaaagtaaggttggtaagagaagtgagtggtgtgactcttactccttaggtgcccagaacttaccatcatctctgaaggcgttacagggaagtggtctctccaatccttccctccctccagtattgccccctctcactttagcatatattaattagcaggttgggctagagaaatcagctgctatgcgggttgattattattattatttttgatccttttccttatttgccttctactccccttaatctaatctaaaagctctgttccatgtaactggagttctttatccctctcttccccttcccttatatattgaggctatggggtaggagaaaagtgcacaacccaccaccccctttactggtgcattaaaatttcttatttacccttttctcccttcccatttctccccactttcatctaccttttctggcaaaaaggagccttgtgctctctgtgaccctaagggcacactgcacaggtgaaattgccccatccagacctggctccactcttgatttctcttgccctcttctgctcttttcctggtgctcttttttctttttttcttttttttttttttttgtcttccagaactgctatatatatatatacacacatatatatttaattttattattattatactttaagttttagggtacatgtgcacaacgtgcaggtttgttacatacgtatacatgtgccatgttggtgtgctgcacccattaactcgtcatttagcattaggtatatctcctaatgctatccctgccccctcccttctcagtggggtatgggtaataggatagccatgggcttttggggacctttaacttttttttcctcttttgtttataaaaacactaaacattcaattccagagaaccaaaaatcccaccttcccaccgaacactgctaacgggcttgtgttctgctccatactttttctcttttctttctgtcttgttaatgcttttaaaaacaaatgagtttttatataaataaagtatttaaagtgtgaaaaaaaaagaatgcatggggtcatctacatgtcttttttattagactgtctggtgttggccagtagtccctcccataagaatgcctggggtcgaacaagtgtctctcccatgaaaatggctgggatcactcaggcttttcttttattacaatgcctggggtcagccgggagtttttcccgctagaatgcttgtcgcccaattgtctctagcattagactgcctgagtttggcaaagtgtgtctctcataataatgcctgtggtcgtcaaggtgtctctatcattagactgcctggggacactggggaggtatctcccattagaatgcctaggcttgcccaggtgtctttataattagactgtctgggttcagccaggattatctcccaagacaatgcctgggttcagaagagagtctttcctattagaatgactggaatcgccaaggtgtctctattattagaatgtctgtggtcaccaagagtctctccttttaaaatgcttaggctcacgcaggtgtctgtatcattaaaaaatctggggactgtcaatagtctctccctttagaatacgggggtggccaaggtgtctctatcattagactgcctggggtcggccagcagtctctcccattagaatgtctggggccagccaaaagtttctcccattagaatacatgaggtttcccaggtgtctctatcattagattgctcggggccggctgggagtctctcccactgaaatgtctaaagtcacccaggtgtctctattattagattgtctgtgcctgtggttgcccggtagtctcttttattaaaatccttttggtcactccagtgtctctatcattagactgcctgagatcggctgagagtctctctcattagaatgcctgggtccgcagggagtctctttcattagaatgcctgaaatcgcccacatgtctgtatcattacaatgcctggggttgcccaggtgtctctgtcattagaatgcctggaataggcaaggagcatctctcattagaatgcctgggttcactcagatgtctctatcattaggcagcatggggtcggccaagaatctttcccattagaatgcctggggtcgtccaagtgtctctatcattaggtggcatggggcccgccaggagtttctcccattagaatgagtttggtcgctcacgtgtcctataattagactgcctgggtttggcccagactctctcccattagaatgtgtggggttgccccgcagtctctatacttagactgcctgaagtcggacaagtgtctcttttactagaatgactggggttcgctgggagtctctttgattagaatgaatcaggtctccacgttgtctctctcattagactgcctgtggttagccgatactctattagaacgcctggggtcgcccagctgtctctatcattagactgcctgggattggatgggggtctctcccattacaatgcctgaagtcaaccaggtatttctatcattagactgcctggagtcaaacgggagtcactttcagtagaatgcctgggatagcccaagtgtctctgtaattagactgtctggtgtcggtcaggagtctctcccgttagaatgtctgggatcacccgggtgtctctatccttaaatttccttgggtcagtcaggattctctccaattaaaatgcctgtggtcagccattagcctctcccattagaatgcctgtagttgcccagttgtcactatcagactgcctagaatctctccaatcagaatactgggttcgcccaagtttctctatcattagactgtctgttgtcagccaggagtctctcccattagaatgcctggggtggcccaggtatctctatcattagaatgcctgtggtaggacgggaatctcttccattagaatgtcttgggacttccaggtgtcaataccattagactgcttgtggtcagctgggagtctcctccattggaacgcctgggattgcccaagtgtctttataattaaacagccagtgttcggctggcaatctctttcattagactgtctggcttagcccagctgtctttatgattagactgcctggggtcggtcagaagtctccccattaaaacacctggggtagaccgggagtctctgccattaaaatgactggagtcatccaggtgttttttatgattagactgttggggatcagccaggtgtctccccattagaaagcctggtttcagccttgttgtctcccattagaatgcttagggtcgctcaggtgtctctatcattaaaataactgggggctcccaaatgtctctatcattagaatgcctggggttggccgagagtctctcacattagaatgcttgccgtcaccaagaagcctctatcatcagactgcttagggtcagcctggggtttctcctattagaaagcctggagtcacccaggtgtctataattagactgcttgggtcagccaggaatctctcctattagaatgcctgtgtccactcacgtgtctctattattagactgcctggggtcggccgggagtctctttcattagaatgcctgggtttgctcaggtgtctctatccattggctgcctgggttcggccaggattctctcccattagaatgcctggggtcagccaggagtctcttccattagagtgcctgtggtggcccaggttatcactttaaatagactgtctggggtccgccaggagtctctttcattagaatgcctggagtaaccctggtatctctatcactagacagcctgtggtcagacagaagtctctttattagaatgcctggggttggccaggagtctctcacattagaattcctgggatcacccaggtgtctttaccattacaatgcttggggttgcccacttgtctttatcattagaatgccaaagttttgtcaggagtctctcccattagaatgcctggggtcgccaagatgtttctaccattagactacattgtgtcagccaggagtttctcccatcagaatgacaggggtcaaccaggggtctctatcatcagaattactggggtcagctggaggtctctcccgtaagaatgcctaaagtcgcccaggtgtttctatcattaggctggctggggttgcacaagtgtctctatcattaggatgtctgggtcatccggaagtgtcttccattagaatgtgtggtgtcattcaattgtctctataattagactgcctggggtccatgggtagtgtctcccattaaaatgctggggattgcccaggagtctgtataattgaactgcctattgtcggccaaaaatctcacccattagaatgtctggggtcaccctggtgtctctatcattagattccctgggttctgccaggagtctctcccattagaatgctgggatcacccaggagtctctatccttagactgcctcgagtaggacacaagtctcttctattagaatcactgtgtttaagcaagagtctctcttattagaatccctggggtcgccaatgtatctctatcattagactgcctggggtggcaaaggtgtctctatcattatattataatgcctggggtcgcccaagtgtctctaacattagaatgcctcggatcagccaggagtctgtctcattagaaagcctgcagtcacccaagtttctctatcactttgcctgggtttggctgggagtctttttcattagaatgcctggggtctcccaggactctgcataattagactgcctgggtttggccaggagtttcttctgttcattagactgcctggggtcagccaggagtctctttcattagaatgcttgtggtcgcctatatgtctctatcattagactgcctggggtgggccaggagcctatcccattagaatgcctggggtagccctgctgtctgtataattagactgactgtggtcaactaggaatctctcccattagaatgcctggggtctcccaggtgtgtctatcattacattgccttaggtcagcaagcagtcgctctcattacaatgcctggggtcgccctggtatctctatcattaaactgcctgaggttggcagggagtctcccccattagaatgtgtgggtttgactgcagtcactcccattagactgtctggagtcacagaggtgtctctatcattagaatgcctaaggttgtctgggagcctctcccattagaatgcctggagtagcccaattgtctctatcatcacactgcctggggttggccgggggtctttttcattacaatgtctggggtctcccagaagtgtgtaaaattaaactgcctggggcaggtcaggagtctctcctattaaaatgcctggggtcacccaagtgtctctatcattagactgcctggatttggctgggagtccctctcattagaatgcctggaggtaccaaggagcttttatccttagatagcctgaaggcggacaagagtcttttccattacaatcactgaggttggccaggagtctctcccattagaatgccttgggtcgcccaggtgcctctatcattagattgcctggggttggccaggagtctctttcattagaatgcccggggtctcccatgtgtctctataattagactgccagtggtcaactagaaatctttcccattagaatgcctggggtcacccaggtgtctctatccacagactgccttggtcagccaggagtctctcccattagaatgcctgtgttcactcagttgtcacttaaattagactgcaagatgtcggccaggagtctcttccattataatgtctggggtcactcaagtgtctctatcattagactgcctgtggtcagccaggagtctctccattagaatgcctggggttgccaggagtctctcacataaaaaaatgcctgttgtagcccaggtgtctctattactaaaatgctcacttgtctctatcattagaatgccagggtttggccaggagtttctttcagtagaatgcctggggtcgaccaggtgtttgtatcactagactgccttgggctggttggttgtctctctcattaaaatgtctagtgtcgcccagtgtctctatcattagaatacctggggttggccctgggcctctcccataagaatgcctcaggttccccagctgtctctatcattagacagcctggggtcgcacaggtgtctctatcattagaatggggtcatccaggagtctctcccattagaatgtctggggtcacctaagtgtctctataatcacactgcctgggttcagctgggagtctctttcattagaatgcctgcagtcacccaggagtctgtataattagactgtctggattcagccaggagtctctcccattaaaatgcctgatgttgctcagctgtgtatccttagactgtcttgcttgggctgggaatttgtcttattagaatgcctggagtcgcccaggaatctcacctgcctagggtcagacaagagtctcttccattagaatcactgagggtggctgggagtctctcccattagaatgactggggttgcccacgtgtctctattattagactgcctggggttagccaggagtctctctcattagaatgcctggtttcgcttacgtgtctttatcatttgaccacctggggtcagccaggaatctctcttattagaatgcctggtgttggctgggagtttctcccatttgtgtgcctggggtcacacaggtgtccctatcattacaatgcttgccatcttccagatgtctccatcattacaatgcctctggatgaccgggagtctctcccattaaaatgcctgcgattgcctaggtgtctctatcataagactgcctgggatcgcatgagagtctctcccattagaatgcctctggttgctcaggtgtctctatctttagacttccttatgtcagccgggagtctctcatattagaatgcctgggtgttgctcaggagtctctaaccttaaactgcctgggatcagacaagtctctcccattagaatcactggggtgggctgagcctctcccattagaatgactgaggtcgcccaggtgtctactgttagactgcctggggttagccaggagtctctccctttagaatgcctggttttgcccagatgtctttatcatttgactgcctgggttcagccaggaatctctctcattagactgcctggtgtctgctgggagtctctcccatttgagtgcctggggtcgcacaggtgtctctatcatgacaatacctgagatcgttcaggtgcctccatcattacaatgagtgtggacgatggggaacctctcccattacaatacctgtggtcgcccaggtgtctctatcattagaatgcctgccattctaatgtcagttgggaatctctcccatgaatacctgagctcgaggagctgtctctatcattagacagcctgcagtcggccagtagtttctccctttagaatgcctggggtcgtccagatgtctttatcattagactgcccagggtcagccaggtgtctgtcttattagaatgactggggtcagctggcagtatctcccattagaatgtctgtggttgcccaggtgtctctatctttagacagcctggggtctacctggagtctttcctgttagaatgcctgtggtcacccatgtgtctttatcattagactgcttgggttcggccaggagtctctcccattagaatggctgaagttggccgggagtctcccccattagaatgcctgtggttgcccaggtgtttctatcattagaatgcctgaggtcggttaggggtctctcccattagaattcctgtggttacccaggtgtccctattagactaacttggttgggccaggagtctctcccactggaatgcatggggttgcccaggtgtctttttcattagactaccttgtgttggccagtagtctctcccataaaaatccctggggttgaccgagagtctctcccattaaaatgcctggggtcaaacatgttgctctataattacaatgtctggggttggtcaggggtctctgccataagaatgcctagtgtggcccagctgtctctatcactagactgcctaagttcggcaaaaagtctctcccataataaggcctgtggtcacccaggtgtctctatcataagactgcctgctgttggtcaaggatctcttcccttagaatgcttcggttcacccaggtgtctctataattaggctgcctgaattcagtcaggagtctctcttaagacaatgcctgggttcacccaggaatctctcttattaaaatgatgagggtcaccaacgcgtctctattattagaatgcctgggctcacgcaggtgtctctatcatcagacagcctgtggtcgaccggtagtctctccctttagaatgcctgtggtcgcccaggtgtctttatcattaggtggcctgaggttggccagcaatttctcccattagaatgcctggggtcagccaggagtctctttcattagaatgcctgaggtctccaaggttcctctatcattagaatgttcagggacagctgggagtgtttcccattgaaatgcctagggttgtccaggggtctctattattgtactgcctggggtcagccagggttctctgccattagaatgcctagggtcacccaagtgtctgtatcattggactgcctggagtcgcctagtagtctctcccattagaatttctgcggtagcctagatgcctctatgatagggctgcctaatatcagccaggaatctgtttcattagaatgcctggggtaagcagggtgtcttttccattagaatgcctgaagtcgcccatgtgtctctatcattagaatgcctggggtcacccaggtgtttctataattagaccgtctggggtcgaccaggagtctctcccattagaatgacgggggtcgcccaggtgtttctatcattagactacctggagttggcagggggtccctttcattagaatgcctgaggtcacccagttgtctctatttttagactaccttgggctggcgcaatcctctctcattggaatgcctgtggatgcccaggtgtctctaagctcatactgcttaggtaggccagcagtttctcctattagatttcctggggtcggccaggaatctctcccattaaaatgtctggggttgcccaggggtctctatcagtagaaatcctggggtcggtggtgactcttttttattagaatgcatagggttgcacaggtgtctctatcattagactgcctgggctcaaccaggagtctcttccattaaaattctgggggtcactcgtgtttctgtcactaggccacctggtgttggctgaaagtatctttcgttagaatgccttgggtcgcccagtttttactttcattagattacctggggttgaccaggagtctctctcatttcaatgccttcagttgcccaggtgtccctattgttagattgcttgctgtctgcaaggaatctctcccattagaatgccttgtgttggccgagagtctctcccattagaatgtctggaattgcccaggtttttatatgatgagactgcctggggtcggccaggggtatctttctctcgaatgcctgggttcatgcagctgtctctataattagacagctttgagtcagccaggagtctttcacattagaatgcctgttgtcgcccaagtgtctctatcattagactgcctggtgtcagctgggagtctctcccgttagaatggctaggttcaccccagtgtctttatcattagtctgccagtggtcagctagaagtctctctcattagaacgcctggggtcggtcgggagtctctcccattagaacacctgggattgcccaggtgtctctatcattagactgccttggctcagtggggagtctctctcatttgaatgtgtggtgtcaccagatgtctctatcattagactgtctggggtcagccaggagtctctccctttgtaatgtctgggaccaaccaggtttctctattattagactgcctggtttgtatgaaagtctctcccattggaaagcctggggtcgaccaggtgtctctgtcattaaaatgcctgggttaggctggcagccttcccattagaatgtttggggtctcccaggtgtctctatcattagacacactgggtttagccaggagtgtcacccattagaaagcctgtggtcgctcaaatgtctccatcattagaatgccactggtcgctcaggtgtctctatcattagaatgcctggggtcagctggtacctcttccatttgaatgctttccaggtgtctctatcattagactccctgggtttggatgggagtctctcccattagaaagcctggggttgacaagatgttcctatcattagaatgcctggtgtcggccaagaacctatccccttacaatgcctgggttcacccagttgtctctaccattaaaatgcttgagtttggccaggattctctcccatcaaaatgcctggggtagacaatgtatctccataatttgacagcctggggtcagccaggagtgtttcctgttagaatgccgggggtcactcaggtgtctttttaattagactgactggggtcggaccggagtctttttcattaaaatgccaggggtctcccaggtgtttctatatttagactgcctggggttggccgtgagtctctcacgttagaatacctgggtttgtccaagtgtctttgttattagactgtctggataggccaggagtctctctaattagaattcctcgtgttgcccaggtgtctgtatcattagactgcctgggattaaccaggagtctctcccataagaatttctggagtcgcccaggcgtttctatccttagactgccttgggtcaaccaggagactctcattagaatgcctgggttcggccaagagtctttcccattagaatgcctgggcttacccaggtgtctctataattagaatgccttggtttggccaagattctctcccatgagaatgcccggagttgtccaggtgtctctatcattagactgcctgtggtcagcaagaagttcttctcgttagaatgtctggggacgttaaggtctctctatcattagactgtctgggttcggctggaagtctttattattagaatgcctggggttgcacagaggtctgtatcattagactgcctgagattggccgggagtctctttcagtagcattcctgggttcacccaggttctctattattagactgcctggggtcagccaggtgtttctctcattagaatgcctgggattggaccggagtctctcccattacaatgcctggggttgcccaggtgtctctatcattagactgcctggcatccgctgggagtttctttcattgtctggtgttggctgggagtctctgctataatatcgcctggagtcgcctaggtgtctctttagaatgcctggggtcgcccaggtgtcttattagactgtcttgggttggatgggattctcttccattagaaagactgggctcaacaaggtgtctctatcattagaatgcctggggttggccggtagtctttcccattagaatgcctgggttctctcaggtgtctctttagttagaccacctggggtcagccaggagtctctcccattaaaatgctggggtttggaccagagtttttcccattagaatgcattgggccgcccaggtttatcattagaccgcctggggtcggccaggagtctcttccattagaatgccagatgtggcccaggttcttctatcattagagtacctggggtcggccgggagtctctcacatttattaaactgcctgacgtcaactgggagtctctcacattagaatttttggggtcacccaagtatgtctattattagactgcctagggtcggccatgagtctctttcattagaatgcctgtgatcgccaaggtgtcttggcgaatgctaacgtgtttctatccttagactgcctgtggtcagcaaggagtctctcccattagaatgtctgtggtcacccaggtgtctctaatcttagactgcctgtgatcgcccaggagttcgatttattagaatgcctagggtctcccaactgtctctatcataagaatgcctgaggtcgttcaggagtctcttccattaaaatgcatctggtcgcccaggtgtctctatcattagaatgaatggggtcacctggaagtttctcccattggatttcctggggtccccgaggtgtctctatcattagactgcctggcggtccacacaagtctctcccattagaaagccaggggtcgaccaggtgtctctattattagaaaccctggaatcagccaaaggtctgtcccattagaatgcctggattgcccaggtgtctctatcattacaatgcctggcttcagccagcagtctctcccattataatacctggttttgcccaggtgtttccatcattagactgccccaggtcagccagaagtgtctcccattaaaatgcatgtgtctctatcatgatacagcctgtgatcaactggtagtttctcccattagaatgccgggaatcactcatgtgtttttatcattagactacttggtgtcggctgggagtctttcccattggaatgccttgggtcgtccaggtgaatttattattagactgtctggtgtctgcgggagtctcttccattacaatgctttgagttgcactggtgtctcaatcgttagactgttgggttctgccaggagtgtctcccattacaatgccttgggtcaccctggtgtttttataattagatttcctggtgtcatctaggactctttcctattagaatgcctggagtcgcccaggtgttactattctttgattgcctggggtcaaccaaggctctcttccattagaatgtctcaggtcggctgggagtctttcccattaaaatgcctggagtcgcttaggtgtctctatcattagaatgctttggattggccagtagtcttccccattaaaatgcctgggtttggccaggtgtgtttataactagactacctaaggtagtctagggtcagccaggagtctctcccattagaatacctgggttcagctgatagtctctgccattagaatgactggggtcacctaggtttttttttttttataattagaccacctggggtcggccaggagtctctcccatttgaatgcgtggggtcacccaggtgtctctataattagaccacctggtgttggccaggagtctctcccattggaatgcctgtggtcgcccaggtgtctctattattagaatgtctgtggttgatcgggagtttctccaaaatgcctgtagttgattagctgtctctattattagaatgcttgggttcgagaaggagtctcttccatttcaatgcctagggttgatcagttgtctctatcattagaatgcttggtgtcagccaggagtctcttccattagtatgcctggggccatccaggtgtctctatcattagactaccttgggtcagccgttagtctatcccattagaatgctttggtatgcccaggtgtctctatctttagactgcctggctcagccaggagtcattcccataagaatgcctggtgtcagccgggggtctctcccattagaatgcctggggttgcccaggtgtctttataattagactgcctgggattgcacaggattttctcccattagaatgtctggggttgcccaggtgtctctatcattagactgctggtgttcggacaggagccgctctcattaaaatgcctgcagtcgcccaggtttctctatcattagacagcctggaaacggcccagagtctctcccattagaatggtgtctctcctggggtcagccaggaacctcttccattagaattcttgtgatggcccacatgtctctatcattagactgcctggggttggtcgggagttgctcccattagaatgtctggggtagcccaggtgtctttaataattagactgcctggggttgaccaggagtctctcccattagaacacccgtggtcacccagctgtctctatcattagactgcctggggccagccaggagtacctctgttagaatacttgagtttacctgagagtttctcccatacctggggtggcccaggtgtctctatcattagaatgcctagggtcagcggggagtctctgccattagaatgcctggggttggctgggagccttcccatttgaatgcctggggtcgtcaaattgtctctatcattagacttcctgaatgtagcagggcatctctcacattagaatgcctggggtcacccaggtatctgtatcattagactgcctggggtcagccaggagtctttcctattagaatgcttagggtcacccaggtgtctctatcattagactgcctgctgtcacacgggagtctttctcattagaatgcctggggtcacccaggtgtctctatgattagactgcctggggttggccaggagtctctctggttagaatacctggggccacccaggtgcctctatcattagactgcctggggcctgccaggggtctcttccattagaattcctgtggtcgttcaggtgtttctatcattagactccctgcggttggccaggagttcctcccagaatgcctggggtctcccaggtgtctccataaatagactgcctggggtcagccagaagtctctcacaagagaatgcctggggtaggctgggagtctccaccattaggaggcctggagtcacgtaggtgtttctaacattagaatacctggggtcatccaggcttctctcccattaaaatgtccgggctcaccctttgtctctattattagacgtctgccatcggcccagagtgtcttctattagaatccctgtcgaccagatggctttcaccttgccatgtctaatgttgatcagatggctcttgccttaccatgtctaaggttgcccagacaacttgggccagaagcagtaccattcaaatccagcagaatgatgcgactgtgactcactgcagactcaatcttcccagtcttacccaagtgatcttcccatcttggcctctcatatatctgagattgctcggaccttctttttttttctctctctctctcactctaatttcagtttgtttccacaatactcagagtaacttgctgttctttttcttctttgttccatcctttattctcctatgctccttcctgcaaactgagtttgacctttggattttttttttttttttggttacacttcaccctgtgtgtgacaaatagagagagagacagagagagagaggagtttttttaaattgcgacattaattaccttttattattgtacactcctacttaattatttggtctttagggttgttcactattatttccttgttattgttatatatttactgttggttcatttattttgagatggatgtcgactgcatgcatcgcatttagctgccagcttgtcatgtctaagatgaacagacagctctcaccttgccatgtctaaggtcgaccagatggctctcgccttgccatatctaaggtggaccagatggcacttgcctagccatgtctaagattgaacagttggttctcacctcatcatatctaaggtcaagttggatctcaccttgccatgtttaagattgaccagatgattctcaccttgccatatctaaggtcgaccagatggctctcaccttgccatgtctaaggtcgatcagatggctctcaccttgccatgtctgaggttgaccagatgggtctcctcttcgagtgagttcaacaagatggctctcaccttgccatgtctaaggttgaccagatggatcttgccttgccatgtctaaggtcaaacagatggctcttctttttccatgtctaaggtcggccagatgactcttgccttgccatgtctaagctcaaccagatggctttcatttttccttgtcttcagtcgaccagatgtctctcaccttgccatgtctaggtcaatcagatggctctcaccttgccacatctacgattgaccagatggctcttgccattctatgtctaaagtctaccagatggctctcattttgtcatgtttaaggttgtccagatggctctctctttcccatttctgaggtcgactggatggctctagcctttccatgtctgaggccaaccagttggctctccttcccatgtctaaagttaaccagatggctctcaccttgccatgtctgaggcagactagatggctctcgccttgccatgtctgaggtggacttgatggctcccaccttgccctgtctatggtcaacgagatggctctcaccttcccatgactaaggtggaccacatggctcttgatttgccatgtctaagctagatgagatgcttcttgccttaccatgtctaagatggatctgaagcctcttgcattaccatctctaatgttgaccagatggctcttgccttgccatgtttgaggttgaccagatgcttgttgccttgccatgccttaagtagaccatgtggctctcaacttcctatgtctaaggttgaccaagatggctttcaccttgccatgtctgaagtggacttgatggttcccaccttgccatgtctatggtcgaccagatggctctcaccttcccatgactaaggtaaaccatatgtctcttgccttgccatgcctaaactagaccagatgcctcttgcctttccatgcttaaggtggacccaaacccttttcgcatttccatctctaaagtcgaccggatggctctttccttgccatgtctgaggtcaagatgcctcttgccttgccatgtctgaagtagatcagatggctctcactttcccatgtctgaggttgaccagatggttctcaccttgctatgtctgaggcagacttgatggctcccaccttaccatgtctatggtcaacaagatggctcttgccttcccatgactaaggtggaccatatggctcttgccttgccatgtctaagctggacaagatggctttagccttaccatgttgaaggtggacctgaagcctcttgcattcccatctctaaggtcgaccagatggctgtcatcctgccatgtcaaaggtcgaccaggtggctgtcccttgtcacttctaaggttgaccagatggctcttgccttgccatgtctaaggctgatcagatggctcgcaccttgccatgtcgaaggtcgcccagatggctctcatcagcagcagtactgttcaagtccagtagcaggatgtgatgattcactgcaacttcagtctctgtagtctcacctgggcagtcttcgtgtctcagcctcccgagtccttgggactactgggaccttctttcactgttctattcctaacctgacatttagtttatttccacagtacttagagtgacttgctattgtttttcttctttgttcttttgtctgttttcctatgctctttcctgtaaatgaagttgaccttttagattttcctttgtcacactccagcctgggtatcacaaatggagagaaaaagagaaagagaggagatcttaatggtgatattaattaccttttaccttggttcactcccacttatttatacattgttctttaatattgtttatttttttgtttttgtaaaacatttactgttggattgtttttgtttttttgagacgtatttcagcaactagagttggacttagccacaagagtgccatgtctaaggttgaccagatggttctcgccttgtcatgtctaaggtcgaccagatggctcttgcaggcggcagtaccgttcaggtccagcagagggatgtgatcgtgatttactgtggcttcgatctccctggtctcacccgagtggtcttcccttctcggtttcccaattacctgggactactcagaccttcttcctctgttgtttttttctaaacccactgtcagtttgtttccacagtacatagaatgacttgcgttgttttccttcttcattcctctatttttctacactccttccagcatgataaatatgaacccactccagtctgggtgttacaaacagagagagagagagagaggagaacatcttaattgtgttatcgattacttttcacctttgttcactcctatttattgacacaatgttatctttttttattgttaaatattcactggtggattttctgcttacttattttgagagagatgtcagccacgagcattggaccaaggtcaaccagaggacttttgccttgccatgtctaaggtcgaccagatggctcttgcctccggtaataccgttcaggtccagcagagggaggtaattgtgattcactgtaaccttgatctctccagtctcacccggctggtgttcccatctcagccacttgagtccctcagactactcggaccttcttttttttctctaaccccactttcagtttgtttccacatacatagagtgacttgctgttttttttttttttcctttgttcttttctctcgttatgtccctatgctccttcctgcaggaagcagttgacttttatatttcttttaatcacactctagcatgggtttgacaaacagagacagctagagagtaacagagaagtagagagatagaagatcttaattgtgatattaatcacctattacctttgttcactttcacttatttacttattggtctttaaagttgttattatttctttgttattgttgaatatttactgttgaaatttttgtttatttattttgagaaacgtgttggcagcgagcactggacttagctttcatcttgccatgtctaaggtcgaacagatggctcttgccttcccatgtctgaggaccagatggctctcaacagcatcagtaccattcaggtccagcagagggatgtgatccttattctctgcagcctcgatctccccggtgtcatctgggtggacttcccatcttggcctcccgagtccttcagactacttggaccttcttctttttttttttctaacccaactttcagtttgtttctacagtacttacagtgagttgctgttgtatttcttctctgttcttttctctctatatatattcttaccctccttcctgcatgatgaatttgaccttctagattttttttttttggaacaatccagcctggttgtgacaaatggagaaagagagagaagatcttaattgtgatataattgacctttcacctttgttcactcccacttatttatttgtctttaatattgttatggttagttctttgttactgttaaatattccctgttggatttttttcttttgagacagatcttcccacgagggttgtatttagccaccagcttggtaagtctagggtcgagaggatggctctcagcagcagcagtaccattcaggtccagcagagggatcggatcgtgattcactgtgccctgggcgtcttccaggtctctacagggtggccttctgatgatctcggcctcctgattccctcagactatttcgacatccttcctttgtttttcctaaccttactttcagtttgtttccacagtccttagagtgactttctatttttttcttgttttctctttatattttcctgtgctccttcctgcttgatgaagttgacagagagaaatcgagagtgagagatagaaagagattagaagaatttaattgtgatattaattacctgttacctttgttcactcccatttatttgtctttaatattgtttgtagttatatctttgttattgttaaatattcactgttggatttttttctgtttggagtgaacaaaggtgaaaagtaattaataacacaattaagattttctcctgtctcgctgtttgtgtctgtctgtctgtctctctctccaagatgtcagctgagaggattggacttagctgccagcttgccaagtctaaggtcaaccagatggctctcaccttatctaaggtcaaccagatggctctcgccttgccatgactaaggatgaccagatggctcctgcctttggaagtactattcaggtacagcagagggatgtgatcatgattcactgtggtctcgatcttcccagtgtcacccaggtggtcttcccacttggcttccctagtccctcaggctacctgaacttatcctcctccttcctttttttcctaaccccactttcaatttttttttctacagtgaaactaactgaagttttagagagacttgctgttgtttttcttctttgttcttttctccctttttctacactcattcctgcatgatgaaattgaccttttatatttttttgtcacattccagcctgggtgtgacaaatggaaaggggaagagagagagtgagagatagcagaatattttaattgtgatattagttaccttttacctttgttcactcccacttatttattggtctttaatattgtttggtattatatttttgttattgttaaatattcactgttggactttttgtttattttgagacagatgtcggcagtgagcactggacttagccaccagcttgccaagtctaaggtcgatcagatggctcctgccttgacatgtctaaggtcgaccagatggctctagctggcgccaggaccattcaggtccagcagaggtatgtgatagtgattccctgtggcttccatctcccctgtctcgcctgggtggctttcccatcttggcctctggagtccctgggactactcagaccttcttcctctgttttccttctaagcccacttttagtttgtttccacggtactcagaatggtttgctgttttcttcttttctctatttttctatgctccttcctgcacgatgaagttgatcttttagatttctgtcacactctagcctggcatgacaaattgagaaagagagagagaggagaaaatcttcattgtgataatcttcattgtgataattatcttttacctttgttcactcccacttatttatttattggtccttaatattgttattatttttcgttattgttcaatatttaccatcggattttttgtctatttattttgagaccaatttcggctgcaagtgttggacttagccatcagcttgccacgtctaaggttgaccagatgcctcttgctggtgacagtaccattcaggtccagcagagggatgcattcccgattcactgagaactcagactcccaggttttacccgggtggtcttcccatcttggggggccccccgtgtacctgagactactcagaccttcttcatctgttttttgctgttcttgttgttgttgatcttgatggagtctcactctgttgccaggctggagtgcagtggctgatattggctcactgcaacctccacctcctgggtttaaatgattctccttcctcagcctcctgagtagctaggactacaggcatacgccaccaagcccagctaatttttgtatttttagtagagacgggatttcaccatgttggccaggatggccttgatttcttgacctcgtgatctgcctgccttgacctcccaaagtgctgggattacaggcatgagccaccacgcccagcctctgtttttttttttttttaacccacttttagtttgtttccacagtaacagtacttagagtgatttgcttttgtttttcttctttgttcttttctctattttcctacattccttcctgcacaataaagttgatcttttagattttttattttgtcacacactccagcctgggtgtgacaaacagagagacaggggagaagatcttaattgtgatattaattactttttacttttgttaactgcaacctgtttatgtattgttctttaatttttttgtcattgttaaatatttactgttggatttgtttatttattttgagagagatgtcggctgtgagcgttggactaaggtcgacctgatggacctcacctctcgccttgccatgtctaaggtcgaccagatctctctcgccagcagcagtacaattcaggttgagcagagggatgggatcgtgattcactgtggccttgatcttcctggtctcgcccgggcggtcttcccaactggcctcccgtgtcccttggactactcagaccttcttcctctcttttttcctaattccactttctgtttgtttccatagtacttggagagacttgctattcttttttttctttgttcttttctctctctcttttcctatgcttcttcctgcacggtgaagtttaccttttaattttttttttttaatcacactcaagcctaggtgtgacaaatagagagaaagaaagagagagagagaaggtcttaattgtggtattaccttttaccttcattcccacttatttattgatctttcatattgttattatttctttgttattgttaagaattcactcttgtattttttgtttatttattttgagacgaatatcggccataagcactggacttagccagcagcttgccaagtctaaggacgaacagaaggctctcactttgccacatctaagagctacatggctcttgtccattacagtaccattaaggtccagcagagagatgcaatcgtgattcattgtgacctcaatctccctggtctcacctgggtggccttctcatctcagactcccaattccatcagactactcggacattctctgttttttttctagccctactttcagtttattttcacagtacttacagtgacttgctgttgttttcctcctttgttctttactctattttcctacgccccttcctgcgcgatgaagctaaccttttagagtttttttgacacattacatactgggtttgacaaatatatatagagagagagatcttaagtgtgatattaattacctttaactttgtttactcccacttatttggctgtttattgttctattattgtttattatatttttgttattgttatgttgtttgtttgtttggagaaagggtctcactctgtcacccagaatgactgcagcctcaaccctttggacttgagtaatcctcacgcctccaatgcctcccctttccccagtacctgagactacagacacaagccaccacaccagttgacttttgtattttttacttctactttttttattattattattttcatgtcttgagacagagtcttgctccatcggccaggctagagtgagcaatggtgtgatcttggctcaccacaacctctgcctaatgggttcaagtggttcttctgcctcagcctcctgagcagctaggactacaggcatgtcccactacaccaggctaatttttgtatttttaaatgtttgatggggaagtatgtgtaaagacagggttagaggttctgccatgttgcccaggctggtctcaacttcctctttttttttctcttctaatccaactttcagtttgtttccacagtacttagagtgacttgctattgttttaggttttacgttcttctctattttcctatgctcctttttgcatgctgaagtttacctttcagattttttctttttgtcacactccagccagagtgtgagagaaagagagaagattttaattgtgataattatcttttacctttgttcactcccacttatttattggtcttattattgtttgttattatttctttgttattgttaaatatttactgttgtgtttttttgtttatttattttgagacaggtgtcggctgtgggtactggacctagctgctagcttgctacatctaaggtcgaccagacggttctcaccaccggcagtactgctcaggtccaacagagacatgtgatcgtgattcactgtggcctcgatctccctggtcttgcctgggtggtcttcccatctcagccttccgagtagctgggactactcggacaattttcagtttgcttccacaatacttagagggggttgctgcttttttcctttgttctttgctctctctctctgttttaagttttttacactccttcctgcacactgaagttaatgttttagatttttttgttggggggtgagggctaggtcttctcactctgtcacaccctggttggagtgcagcttgtgcgatcagcagtgagccatgattgcacatctgcactacagcctgggtgtgacagtgtgacacacaaagatcgagagagagagagagagagaaagggacagagagagagagagagacaacaattatgatcttaattgcctatttaccttagttcattcccacttatttggttgtttattgttctattattgtttgttattgtttctttgttattgttatgtttattttatttttattttttatgtgtatgtatgtacagacagggttctgggttctgccatgttgcccagcctgatctcgaactcctgcactcaagcaatcctcctgcctcgactacccaaactgctgctattacaggcgtgagccactgtgcctggctcctatctatatacctatctatctacttatcttttgaggagagatgtttcttttttaactttaattataataataattattattagaggtgttgtctcacatctcctgggcagcaattctccagccttgtcctcccaaactgctgcgattacaggcatgacctgccatgcacggtctggttatatttttgatgtatttattctttccagtcctcgtttccactttgggtgcatatttgataatatggggattgaaaacaaatattttgagagagatcaatctcacaaacctgcctttcctttctagtggcacaagcctcatcaggggtagtgtgcctgatctctggtggttttaaatagtgtagaaagcattgctatatgtattttccctgccagggagtcccaaaaaacagctagagaagcaaattatagaagagaaagaggtttataattaaagtgagggtcagaaacttttgtagataaggctgattttagccaagatttgaaggagagattccttcattcaacagatgctgcagtctacctgatatgtttcaggtactcctatgaaataagagtacaacagtgaacaaacattaaacacaaagtttttaatctagtgaggcagagaaacttccctcaaattatcatacaaatatgaacttccatgaaagcaaactcagtgtccagtaggaaaattgtgaaattatgaaatgttattttgatttaatgtatagccattgaggttctttcaaataattataaaatgatcacaataacaacaggtattttaaaagtgtggtataaaagtacagagtataatctttgttttataaaaataaatgcatatttacctctgcacagaggtggttctatgccatgctaaactggttatccctggtgatgagattagcaatcacagactatgttctcataaaagaataatgttttagtcaggaggcaagcaaatttgtttttccactgtttgaatttacaattaaatactttgcatgctttaaatgtaacggaagttttgttatatactctgattctcatattaggctgtttcattttaattttgacattggcagggaataaggtgaaggtggactcttcttgttcagtggagcacatgtggtcctggagaaagctgtcacacagtggactcagagatgtggtccacgggcactaatttcctctcagtccctgcctaagcaagattcatcttcctctgcctgctgtttcatttttttcttctattgtctggtatatcttaagataaaaacttgtttccaaagggaaagtttcagaaatgtttctaagaataataattcaagttggatttccaagtagtattcctgggcaactgattaaattcttttgtcaataatcaaaatctggaatgtcctggattagttccaccatttcatcatgataactccctcttctataatccctaccagaaatgattgctttgcttaaaagcttttccctgagaagacactggtgtgttatttctttatcagcttatgaaaattaattctggttgggtacagtggctcatgcctgtaatcccagcactttgggaggctgaggtgggcggatcatgaggtcaaaattgagaccttcctagccaacatggtgaaaccctgtctctactaaaaatacaaaattagctgggtgtggtggcatgcgcctgtagtcccagctacttgggaggctgaggcaggagaatcacttgatcctgggaggcagagggtgcagtgagccgagagagcgccactgcattgcagcctggcgacagagcgagactccatctaaaaatatatgtatattaattctacatatctaggatttttactgtgcctttgtgtttttttaagctactggttttctcaagttaaacattaaaagtattatggaagtactgatgatgtactcagaggaaaacaatagagcatataatttatttgttataaaatgtaaaagttctgcaagattttcctctgatttgtaaaatgttctctctcaagaaagtttttctttacgtcttacatttttttttattttaaagacccacagggttgcttaaagtgtgatagtcctgttgttgtagcgaagataattacacatacaacctggcttttgtggcatcttgcttaccctattttgcagaacacagataccaaaggttggccttatgaagctggagctatttttgcactgttatttcagaaatgctgaaagaacatcctactgattttctaatactcaaaattatacaataatatacttggacgtttaggtcttaaagacttttcatcatgagtttctgttaaaatctaatatgaaatgcagctgccatccagaatcttaacagtgtttgctgccagccaactgaatgacttattggaggaacgattcatgacttctgggcctgagggactggctgtcagggggctggtttgagcaaagctcttccataggtgactccatatttgcactgacagaagctcctattgcacagaattgtacaattattcagaaagagtagaaatcatgaatctacattttacctgatttcaaactggttgacaatttacttctgcagattatttttctcttctccacttaatttataatttattccatctatttttttccttttctgccaactattgtatttttctagggatagttgcaggaacgaaactgatttctatcagagtgcttattataattctattctattactctgtgaacaaagatgcaaaaatcctcacccaaatattaagaaatcaaatccaaaaatgtataaaaagaattatacactacaacccagtgagatttattacaggcatgcaaatctggttcaacatttgaatataaattaggctgggtgtggtggctcataccggtaatcccagtgcagtaggaggccaaggaaagaggatcacttaaggccaggagttcaagataagcgcagacaacatagcaagactctgtcttttaaagaaattagttcatcatattaagagatataaaaagataatatgatcttatcaatataatcagaaaaattatttgacaaaattcaaaatctattcatgagaaaaccactctgcaaactaaaaatagggaaaaacttcctcaatttcaaaagaatgtttattaaaaaaaacctacatcttacctcatactaaatgtagaaacactagatgccttcctgctaagatcaggagcaaggcaaagatgtctcctctcaccattcctatacaacattatactgtaagccccaggtaatacaatgacaagaatagaaaaggtacatagattaggaaggaagaaataaaactgtctttttacacagatgatataattgcctatggagaaatctgaaaggatcacaaaacaaaatcttagaataaccaattataatgagcaattataccaactttgcaaattataagaaaatgtaaatgtcaattattgtcctacatattagcagtgtaattagaatctgaaatttaaaacaatgatatttatgctagtaccaataacaataaaatacttaagtgcaaatctaacaaaataaatataaatataggactttattcacttcaaaactgtgaataaaaacatcaaagaagatctaaataaatagagagaaaattcacattcaagaaacattcaactttgttaaaatgtcagtacctcccaactttacatgttcaatgcagtcccaatcaaaattccacaaagttagtttgtggatattgacaaactgaccctaaagtttatatgaaaaggcaaaagacccagaatagcccagaaaatattcaaaaagaacagttggaatgacactacccaactgtaagaactactataaagctacagtaatcaaaataacatggtactgttaaaaataatagagaaacagataaacgatacaaaagagaaaggtcggaaattgacccacacaaatatagtcagcttatttttgatgaaatggcaaaggcaattcaattgagagagaataatttttcaaaaaacagtactggaaaaactagacatccacatgcaagagaaaagaaaaaaaaaatcctaaacccagacctaacaactttcacagaaattactcaaaatggatcatagctcaatataaaaggaaaacccacaaaacttttagaaaataacaaagatcagaatctgaattacctcaggttttgctcctttctacaacacccaaaatattatccatgaaaggaaaatctgctaagttgaactattttaaaaataacatttctgcactgccaaagatgctgttaaaagaataaaaatgcaaaccacagaataaaagaaaatatttgcaaaacacataactgataaaagactggtatccagaatatgcgacaagaaataaagaactcttaaaacgcaagaataagaaatgaacaacccaattataaaattgcaaaagatccagataccttactaaagaacatataagcatggcaaataagcatatgaaaatatgctcaacatcatatgtcattaggaaattgaaaataacaatggcatactgccacacacatattagaatggctaaaatccaaaacaatgactacactaaatgctggtgaggatatagagtaacaagcactctcatttatcgcgggtgaatatgcaaagtgctatgaccagtttggaagacagtttgccggtttcttacagagctacacatacatttaagtgcaatccagcaatcacactctgtggcctttatccaaaagaggtggaaactttcatctacacaaaactcttcaccctactattaagaagagttttatacataattgccaaaacatgaaaccaaccaagatattcttcaataggtaaatgaataaactaactggggtgcaactatacaacgaacattattcactgataaaaagaaatgagctgtcaagccttgaaaagatatgaggaaccttaagtgcatatggttgggaaagaaggaaatctgaaaaggctacatgctatatgattccaagtatatgacattctgtaaaaggcaaaaccaaggagacagtaagaagatctgtggtatccccaagtttggggggaagaagggagagatgaataggtggggtacagcatatattttaagacagcaaaactattctgcataatgcagtaatggtggatacatgtcatgtcattatgcatttgtcaaaatccatagattttaaaataaaaaaaaccatgaatttgaatgcaaactttagatttcagctaataataacttttctatattagttcattaacagtaaaaatatgccacaccaaagtaaggtgttaataacagaggagaagctgggtgcagggagaggatacatggaaactctgtgctttccacttaatatttatgtaaacttgatacttaccaaaaaaataaagtataaaaaatatcccaatgattactatcaaaagtagactggatttaaaaattatactagttacaaatatgtgactgaatatagtcctatgcagcaattaaaataaataaactcaggtgttaaatgtcatccccatgatcgtaatcacaaaaaagccatagaatatacacaaaagaaaataaaaagtgtaaatgtttcaccagaaaaaatcaaccaaacaagaagaaataatgtagaaaatacaaaactagaagatgtaagatatacagaaaacaaatagcaaaaggacagaactctctacttttaagtaattattttaaatgtaaatgtattaaactatccaattaaaaggcagaaatcagcagaacagactataaaacatgatctaactatcttgtttttacaagattcacattagattcaaagatacaactaggctgaaagtaaaaggaagaaaacagatatttcgtgcaaacagtaagcaaaatagatttgggttggctatattaatatcagacaaaatagacttaaaatcaaaaatcttacataaaaatacaaagacactgtgtattcacaaaagtccctttagcaagaagatataaatattataagcatgcatgtacctaataataaaccactaaaatatatgaagcacaaatcgacagaattgaagagagaagtcgacagaattggagaagtcgacagttctaaaataatagagatgataatactccactctctgtaatgaacagaatcaccagatagaagataagttagaaataaatggcttatataatacaacaaaccaactaaatttaacagatacatatacaggatactccacccaacaacagaagaatacacactattctcaatgtccatggatcacacatggacattctccaggatggactgtatgttatgtcacaaatcaagtcaataacagaaggaaaactaaaacactcacaaagttgtaaaatttaacatactcttaaacaaccaataagtaaaagaaaaaaactcaagggaaattaaaaaatacagagaatggaaaatgaaaatacaacataccaaaagttatgagatgcacaaaagcagtgtgaagatcagaaatttatagctataaacacattaaagaagggccttggctgggcgtggtggctcatgcctgtaatcccagcactttgggaggccaggcaggtggatcacctgaggtcaggagtttgaaactagcctagccaaaatggtgaaaccttgtctctactaaaaatacaaaaattagccgggcatggtagcgggcatctgtaatccaagctactcaggaggctgaggcaggagaatcgcttgaactcagcgggtggaggttgcagtgagctgagattgcaccacttcactacagcctcggcaacagagtgagactctgtcaaaaaaacaaaacaaaaagaagaagaagaagaagaagaagacgaagggtctcaaatcaataacctaactttatgacctaacaaattagaaaaagaatgaactatgcacgaaataaacagaaagaagaaaataatgaagatcttagtagagataaagaaaatagagaccagaaaaacagaaaaccaacaaaaccaaaagttggttcttggttcttcaaaaatgttgacaaattcacaaacttctagctacactatgaaaaaaattacagaatactcaaaatagtagaatgagaaatgagatggggacattactactaattcttctttttttttttttttttttgacagagtctcgctctgtcaccaggccggagtgcagtggcccgatctcagctcactgcaacctccgcctcccaggttcaagcgattctcctgcctcagcctctcaagtagctgggattagaagcatgcaccaccatgcccagctgatttttgtatttttagtagagacagggtttcaccatattggccagaatggtctcaatttcctgatctcatgatctgcctgcctgattctaagaaataaaatgttttaaagagtgtactgtgaacaactgtgtgacaacaaaatgaacaatctagatgaaatggacaaatttctaggtataaaaaacctagcaagacttgattaccaagaatagaaaaattgaattgatccataacttataaggaaatcaaatcaaaaatcaaaaacctgctgacaaagaaaagcccttgacctgatggcttcagtagttaattctaccaaacattttgaaagactgaaaatctttttcaaactcttccaaaaaattgaaaaggagagatcagttccaaactcattccacaatctcagcattaccgtatatcaaagccagaaaaagacactacagaaaactacagattaattatcccttatgaacacagatgcaaaactcaacaaaattccagcaaataaaattcagcagcatattagaaagatgatctcaccatcttgaattaatttttgtataaggtgtaaggaagggatcgagtttcagctttctacgtatggctagccagttttcccagcaccatttattaaatagggaatcctttccccattgcttgtttttctcaggtttatcaaagatcagataattgtagatatgtggtgttatttctgagggctctgctagacctaaaactataaaaaccctagaagaaaacctaggcattaccattcaggacataggcatgggcaaggacttcatgtctaaaacaccaaaagcaatggcaacaaaagccaaaattgacaaataggatctaattaaactaaagcgcttctgcatagcaaaagaaactacatcagagtgaacaggcaacctacaaaataggagaaaatttttgcaacctactcatctgacagagggctaatatccagaatctacaatgaactcaaacaaatttacaagaaaaaaacaaacaaccccatcaaaaagtgggagaaggacatgaacagacacttctcaaaagaagacatttatgcagccaaaaaacacatgaaaaaatgctcaccatcactggccatcagagaaatgcaaatcaaaaccacaatgagataccatctcacaccagttagaatggcaatcattaaaaagtcaggaaacaacaggtgctggagaggatgtggagaaataggaacacttttacactgttggtgggactgtaaactagttcaaccattgtggaagtcagtgtggtgattcctccgggatctagaactagaaataccatttgacccagccatcccattactgggtgtataccctaaggactataaataatgctgctataaagacacatgcacacgtatgtttattgcggcactattcacaatagcaaagacttggaagcaacccaaatgtccaacgatagactggattaagaaaatgtggcacatatacaccatggaatactatgcagccataaaaaatgatgagttcatgtcctttgtagggacatggatgaaattggaaatcatcattctcagtaaactatcgcaagaacaaaaaaccaaacactgcatattctcactcataggtgggaattgaacaatgagaacacatggacacaggaaggggaacatcacactctggggactgttgtggggtggggggagcggggagggatagctttaggagatatacctaatgctaaatgacaatttaatgggtgcagcacaccagcatggcacatgtatacatatgtaactaacctgcacattgtgcacatgtaccctataacttaaagtataataataataaaatttaaaaaaaaagaaagatgatctcaccacgaccaagtgcaatttattcttagaatgcaaggatatcttaaaacatgaattttttaacatataaaaattgatcaatgtgtacacattaacaaaataaaagaaacattgatcacctcatggatgcagagaaaagtattttatgaaattcaaaatcttttcagggtgaaaacactcaaaaaagtaggaattttaaaactaaaatactaccattgtgaaatccacacattaaaaaaccacatcaaacaatgtactccagggtgaaagacaaaaagcttctgctctaagctcaggaacaaggcaaaggtgtctgcttttgctatttctattccacatagtgttggaagttctagtcaaattaagaattaaaaagaaacaaactatccaaattggaaatgtagaggtaaaattactctagcctacagataatataattttatgtggaaagctctagagatttcacagatccacacaaaaagtattacaactaataaattcagcatagtagcagcatacaaaattaacatgcaaatatcacttgtgtttctatacagtaatgatgaataattagaaaacaaaactaagcaaacaagcacatttacaatagcactgaaaagaataaaatacgtcgggagtaacaaaaaaagcaaaaaattctattttgcagaaatagaaaaatcctacctaaatttcatatggaatctcaagggaccccaatgagtcaaaattatcttgaaaaagaagtccagtgttacaaaatgtacacttattcattccaaagcttaatacaaagttccaaaatagtgtggtactggcaaagagacacacatatggacactggaacagtataaagcagcatatggtcaaataatttttgatggggatacaaagaccgttcaatgggcaaaggactgtctttataacaattggtgctgggaaaaaatggatatccacaagcaaaaggatgaagttgaacatttaccctacaccataaacaaataaaaatgcatcaaagacctaaaggtaagaacttaaagtataaaatttttgaataaaatataagtagaaaacatcatgacaatatcacaaatataatgacacatttaaaaaagtagatgtggccaggcatggtggctcacgcctgtaatcccagcactttgggaggaggaggcagccggataacgaggtcaagagattgagaccatcctggtcaacatggtgaaaccccgtctctactaaaaatacaaaaatcagctgggcgtggtggcgcatgcctgtagtcccagatacttgggaggctgaggcataagaatcgcttgaacccaggaggtggaggttgcagtgagccgagacaggccacggcactgtacagcctggtgacagagcgagactctgtctcaaataactaaaaaagaaaaaaagaaaaagtaggtgtaaaactatccatagtagatactctcatttacataaaatccagtaagaaaacaaaactgaagttctggcttccggtaatactggagtagcttgctaaactaacactctcacagataacaatgatacaatctggataaaatattatatatagttacatagaaacattcatctatatacaatacatacatacgtgtgtgtgactgaatgagaatttcaacctttcccaccgtagggaagataattattctgtttgaattcagccacatttaccccctcttcaaataataacaatgctcttccaaagaatacaacagaatttagtctctataactaatatttataatttctattacacaatattaaaattcataaaatgtgtgaagaaatgtaacatgcaaactatacacaagataaaaagcaggcagcagaagctatttctaagatgtccgagatgatgtaatcagcagacaagtatttcagggcagctattataagtacgttcatgggggtaaaggaaaatattctcataatgaattaactcatgtagagtctcagcagagacatggaaattataaaaagagtaaaatagaagacaataaaataataaaataaaaagaacttttagtttacagagtagaaacagaagacagcaatataaaccatccaatctgaagactgaaacaagtttaaagaaaatgaaaagaggcctaagagacctgtgaaatgattgagtctgagacagagagggagagacagaaaaattaaatataatacaaaaacaaataaacaatagctgaaaatttaaaaacttggtcaaaaccgcaaattcttatattcaaaaggtgaacacactccaaaacaaaaacaaaaacaaataaaaccatatcgaggccctactgtgatttagaaaactggcagagcaagattttccagggagttgctatgatttctcattttcactatttataataatggaaaatatgcactccttagttttcttcttggagaaagtctgacttgtcaaacacagatgacttttcagtttagttttcaaggtttaatttcttaccttggaaatcaattaaatttgtttctttaaaatgtcgcagtaaaattgctcctccagacagatgtccacggagattctgtcctgctgcgtccgcctttcacagaactgaggttgttcctacaccagtttcagaagcgtgtaggcacgctttattacagtggcagcagcgtccctgtgcgaggtctaacccaggtgtgggccctgcagccagcccgggggtccaatgggtcctcctatggagcacaggaagaatcgtggcaggccagagatagacaaaaggtggcttttaaaagggaagtgtcaggttaccagggactgggtacttttacacgcggaccttcggccctgcccatagaaaggggcagcactgcgcatctctgaaggagtgtggcaaagggtggggcaataagaagggtggggcagaaaggagtggcccctcaggaggaaggggcggggagatcccagctactagaggacgcccgttccaatggcaactctgccaaggcgcctatgagagcctcttggcttttacctggtctgcgagaaatcaaactttgggcacaagtcatgaagccgacaagcccgggagacacagtgtcagaattacaaggtgagatcagccgcccggccaagctatcttctcgctagcaggtgaggcccgtgaacagccaagctccccttggcacggcggaaccgcagtggacgcgtggaggggctccgtagaggagggacctttgcttgggatgcggggagctgtagtctcttatctgcacccagcttgttagttgtacgcctgcaggactacaatctcagcacaaagcaggattgtagggcggtgcggatccctggagggagacagcgcggtgcgctcctgccggccatgctggctggggtggtgtcttaggcggttccagccgttagtcacagggcggccggactacaatcccagcatacaacgggagtggaggtggtgaccttgagagagggcctgtgctgtgcgcgcctcgcggggcatgctgggagcagtagcatcttagctgcttccggccgctggtcgcagggctgcgggactacaatcttcgcatgaaatggaagagagggtggtgcggatagcttgaggaaggtacggataccttgagggaggtatggatacgttgagggaggtacggatacgttgagggaggttacggatacgttaagggaggtacagcagcggtgcgcgccttgcagggcatgctgagaggaacagttttttaactgcttctggctgttggtggcagagctgcgggactacaatcccagtatgctacgggagtggggatgatgctggtcccttgaggggggggggcagcgcggtgccctcctgccgggcatgctggtaatagtgtcttagctgcttccggccgttggtcgcagggctatgggactacagtctcagcatgcgcagggttcaagggtgttgcgcagccccgcagggaggggcagggcggtgttgacctctgtttccaaacccatgctggctactgaatctgtgccacccctggctaaggggagtgagtccatagagggacttgaagggcaggtctgggctgggcagtgaggagagtatgatactgcaaagtgcgcctcgcctttgccaaaatcggtcgggtctcaggctcaccccacctcccgctgctcagttccgtttccctccagagcatcaagcctcctcccgcccagggggcctcctgctttcctaagctgctgtggaatcggcctgaggtcccagacgctgtccattgtgctgctgctctctgctttctccagccagagtgccagttcatccgcttttgggagaactccgccgcctggcctgcccgcggaaaaggtcacagctttgcagggggtgacatgggctatggcttcctggaaatgtcaccctcactagcgccttttagatagatgtgaattttgagacatgagggagagtaattattggtttacccaggagatgctaagagcagaggagaaaaccctaatttccaggcatgtgtcctgagccagggacaggctggccagaccctaagcccccagtgccgccagagagcagcctactgccctgatttgtgtggaatccccttcgtgctgctgggccttagcgtcagggacagcccagtcaggtgaaggtggggatgacccatgggcttctggaagtgggttggtggtcctgggagggccagcccatccccccttggagagggtctttgtgctgaaggatgcccacagaggcctgggtaccaggaacactgctctaggcaaggtgcctttcttccagatttggctgaaaggaaggaagacttggtcagcttttccacccagccatctggcccttacagggctgctccccatggacctgggtttgtagagtcctccagggctttgtgtggcccactagttctgatactgaggacacccctgcaggctgttaatttcagaacaaggggtgtgtgcagactggggcatgggtgctgtcagggtaccccaggctgctccagggacggtaccccagtgttcaacttggcttggggccccctgcctcatgcccttactccagggctgcttggcctgggcttgagccatggtccagaactcaggtggccccattgccacctaatataagggcctgtctccacagtgggtgagacgcccctgggcactgggctcttcagtcatccagggctatccactccatggcatgagttcccacattcagctgaactctgtctggctctggactggggtccctcctgtgccctttccctgaatcctctctgggtccgagacactgatcctcttcactctctggcttaaggcttgttctcctgacctccttggaggggtgctcaggattgaggacccctgctgttctctggggctgttggtactcggaggtgtgggtgttggcttgcactgagaagtccaaccccttcagtgcccttcaggggtcctttaagagcaggagtgatagggtgtgggggagtgccttagaggggtcttgccctcatcccctgccctgtctctgagacgtgtccagtaaacctgaggtcagcacctcaggaatgaaataatgtcttttgcagcaacttgaatgaagctggaggccattattccaagtgaaataactcaggaattaaaaatcaaatgccatatgttctcacttataagttggagctaagccatgcgtatgcaaaggcatgcggggtgacataatggactttggagactcagacatgagggtggcaggtggatgaaggatgaaaaaactacctgttgagtacaatatatactactcaggtgacaagtgcactaaaatctcagaatccaacactatataattcattcatgtaaccaaaaaccacttgtacccaaatgatattgacattaaaaaaaatttaaaactaacaaaatttataataaaagctttttaaaaaataaaaaataaaaacagtgtcaaagtgttaatttattgtgcattgcatagcaagccccttttgctcagtaccacactcactactggagaaacaaaaccttgaaaattaaagaagaacctgcacataaatgataattctgataagttatttatacactgcctacatgaatattacagatatgtgttaaagacaaagatctatgttagattgggtcagctttatgcttggtcattatatttccaattcttctctctcaaaatacaacagtcatgggttgccatggtgattattccaaatgcattgtgatcatatggaactggtgacgtgttctcatttccctttcagttataaaataagcctgatgttcctagccatcaaaatctcactaacacctaactacttcagtttcaactgtggttcctatttcaagacaatcactcaaggttgcaaatcacagaaagacaagaatgttttcattaaccaaaacattaatcaaaaattataccccttgaggccatgtaatttggtttttatttagtttattgtctattcaggtccataaagcctacaactgcaacaatatatacagttcatgatgacttaatatttattgaatagtaaaattaatacatgttaagagtagatctggcttcaggtaatcagggctgaagtgatatgtgcagtggtcaaggacaaatgtcaatgtataatctgacctcctgcactcgaaacacacatcaatactttaaatgcctcagaagaaagtcacgtaggagaataaatgaaagaaaatagaaaagttgttaattagattaagaaggaattaaacctggttttaaaatagagagataaagacatacaatataaaaatactgaagaacaagtagcataggcagaggagcactaaaggtataacaggaaagaaatatatctaaaaatattagtttctgagttaagattgtagatgtagagacctgacaaaaagagttgttcctacacattaaccaaccaaacaaacaaaaaagctggagaaactacaaacgcatggtcgatttctcctgagccctttagagaactgaggtcatggggaagacaacaaactcaacatcagggcatgcaggagcctggccccaggctttcaagtgcaccctggtgaactggtataattaagccagaacatttgaactagttcctggtggctgtgtgtcagtgggtgaggagaatgagaaaccctggagtctacagacatagagtttacatttttctgtatattttttctaggaacactacaaggcctgttagagaagaaagggtagaatcccgagaatgttttccccacagtgctgataaggagagaccactatcccatctactgctacagctctggagacagagctctcccacctgtcatatagaacacaaggaccaatctgcagagaaagagcatccaaacctgatccagtggacactggggaaaaactcaccacagctgagtgtggaaaaacaaggccaacacacacatctctgcacagatacatctcccataaagaaactaaagtgttaatttacagggcactgttgcagacccacttcagctggaagctaggaacatggacaaggagcctctctaccaccaagggagagagaggaatgtgctcttgtcctggcattgcatccacaggaggggcaggaaattctttgaaggtcagtaaccccataccccaattaacagtgcttaagtgtgaggctccctcagaacatcagagatatcctcactccctcacccctgccaccaggctaagaagcatggagcaaaaaaaaaaaaaaaaaaaacagaacaaaacagcagaatatagctgggccaagtgcaagagaccaaagtataatgagagggatttgaattatttttttgacagagtcttgccctgttgctctggctggagtgtagtggcatgatgtcagctcactgcaaccgtcacctcccgggttcaagcaatttttccgcctcagtctcctgagcagctggtattacaggcgcccaccaccacgcccagctaatttttttgtatttttaggagagatggggtccctctctggtggtaaaattgatgagaatatgacactttttatcattaatctagtaaaaataaaacaaagtgttatttttctgatatagatttatacttcagtatatgtcaggcagactgtaaagaactctatcagaatattgataaaataatgcaacactaaatattaaatattatatacttatatataattattatattgcccaaaatagcatattctctaatgcgtattttgcagtaggtttgtaaatagcttctttctctcatgacaatctttcttctttttctaatgtctgatcaagcccatagactttataatcagtctttggttcctggtccatttaattaatggtggtgttttccctaacatccataattgtgcatatgctttgtggcttacagtattaagaataccccaatatataagtgaggataatgaagataaacttgatctgtattatctgccttctgagagtgctcaggggctttaccttcaaccgaagggcaagctggttgctacgtctcatagtgagtgctgagttttgcatttagattgataagtgtgtgctgtatccaatagaagcgaattcttctttacactcagatcgacctatgtgacttcatgggtttttgttctatttcactcgggtatgcccaggttttcagatctcatgactactttattttggagttgccagactcagcaaataaaaatacacgacacacagttaagtttaatattcagaaagaaaactgttgtggcaagtcagggaccccaaacggagggaccggctgaagccatggcagaagaacaaggattgtgaagatttcatggacatttattagttccccaaattaatacttttataatttcttatgtctgtctttactgcaatctctaaacataagttgtgaagatttcatggacacttatcacttccccagtcaatatccttgtgatttcctatgcctgtctttactttaatctcttaatcctgtcagctgagaaggatgtatattgcctcaggaccctgtaataattgcattaactgcacaaattatacagcgtgtgtgtttaaacaatatgaaatctgggcactttgaaaaaagaacaagataacagcagtgtttaggaaacaagatagatagccttaaactctgactgctggtgagccgggcagaacagagccatatttctcttctttcaaaagcaaatgggagaaatatcgctgaattctttctcatgatggaacatccctgagaaagagaatgtgtgcctgcgggtaggtctctgaactggcccccctgggcatagcctgtctcttatggtcgaggctgccgagatgaaatagactccagtctcccacagcgctcccaggcttattaggaagaggaaattcccgcctaataaattttggtcagaccagttgatctcaaaaccctgtctcctgataagatgttatcaatgacaatggtgcccaaaacttcattagcaattttaatttcgcatcggtcctgtggtcctgtgattgcgccctgcctccacttgccttgtgatattctattatcctgttaagtacttgatgtctgtcacccacacctagtcgcacactccctcctcttttgaaaatctctagtaaaaacttgctggtttttgtggtttgtgggccatcacagatcctaccaacgtgtgatgtctcccccggacgcccagctttaaaatttctcttttgtactctgtccctttatttctcaagctggccgacacttaggaaaaatagaaaaaaacctacgtgattatcggggcaggttccccaatagaaaacaaataactttttagtataactataaaataaacatttgcgtgtaatatttctattcccacctattatatattacatacatacacacacacacacacacacacacatccttttgcttacctgaatttcatatttaatgttcttggactttttttgttgacctcaatccataagaactgtagttctccccagtacagtttcagcaccaatgaccaagtctcatcagaggaggccacatgatgatctagcagatagactctttattcagtatgtgagagtcatttacagactggggacataaattagaaatgatgagctggatgtcttttagggtgaaaaattactaaatttctaatctatgttactttttctatttattctctctgttacataacctatgatacagacagaataataatataattctgatacatggttaatgaataattccacatatatatgtgatttatatccaaatattgctttacttgtagtggtttgttaaccttctaatgtggagatcattgagcctttccgtgagtattctcctggtgtttctcctgagtgccacatggcaacagattttaactgagctgagggcccaaatgtgcattgttgagaactatcaattgcttggttctggaagttgaaataaatatgtccctttattagattaagtgcttgaagaaaaagtaaataagatactgcaatttctccctataaactcatacatatcaggtatgcagtttcttctgtataaactcatacatatcagatatgcactttctcctttataaactcatacgtatcaggtgggtttagagcaatattctacctcagccattattctctgagtacaagccaagaatgcaaactgtcacatgatctgtattgccttgcatatttatgcttacgggccagagtagttttaactgacgttgaaaacagttgaacactcttacatctcacgggaggaatagagtgaatataaaagatttttctcagcattttacagctgaattgttctacatccagtattaaattgatttaataaaataatactgccagcatccaaagaagataccatgagaacaatttctgaattattcagtacaatttcataataatattttcatacggagatctctcaattaacatatgagagaaattgtctttattatttgagagcaaagtatttttgaagacatgagtgggtatctttatattaagtgaagtcttaagaaaaagatccccgtgtgagcattttaatgtaactttatgaatgccataaatttgaaaaatgtgttttttgttctctggaaaattgagagcaggactttttaacacttccattctgagacgttaaagagagttaatataaggggtctcatataaaaactaagctagaggagaaccaaagcgttttgaaaagatacagttagtacaactgtagggaccagccccacagggttggtgggtctctccccatgtgtggagacaagagagtgtgtagaaataaagacacaagacaaagataaaagaaaaggcagctgggcctgggggaccactaccaccaagtcgcggagactggtagtggccccaaatgccaggctgcactgatatttattggatataagacaaaggggcaggataaggagagttagccatctccaatcataggtaaggccacgtgggtcacatgtccactggacaggggccccttccctgcctggcagccaaggcagagagagagaggagacagagagaaacagcttacgccattatttctgcttattagagacttttagtactttcactaattttgctactgctatctagaaggcagagccaggtgtacaggatggaacatgaaggcggactaggagcgtgaccactgaagcacagcatcacagggagttggttaggcctccggataactgtgggcgagcctgactaatgttaggctccacaagaagtggaggagtagagtcttctctaaaccgcccccaccccgcggggaaagggagactcccattcccggtctgctaagtagccggtgtttttccttgacactgaggctaccgctagaccacggtccgcctggcaacgggcatcttcccagacgatggcgttaccgctagaccaaggagccctctggtggccctgtctgggcataacagaagcctcgcactcttgtcttctggtcacactcctcactatgtcccctcagctcctatctctgtatggccttttttttcctaggttatgattatagagtgaggattattataatactggaataaagagtaattgctacaaactaatgattaatgatattcatatataatcatatctaagatctatatttggtataactattcttgttttatgttttattatactggaacagcttgtgtccttggtctcttgcctcggcacctgggtggcttgctgcccacatacaacaatgttcatatcctaaactccagaatctgtgaatatcttaggtaatgtgacaaaggaaaattaagatatagatagtgtcaaggttaacaagcagctgacttcatgataaattatctttatcatgagcagaagcctcacgtaattagaagggcgcttaaatatgaaagagggagaaaaaaagaaactttatcacactgatgtgatattaggtcaactcaatgcaatatttttttcctaagaaaatttttggggattattttcccattagcataaagttcagttcagttgttcaaacacctgtgatttatttttacatgcatattactatggatggtgataattaaacaaaaaatgcagaaaataaagaaatgctttctgaagagtgagcccaggtactatattattatatgagtatagacaatgtggaccgtacatgtgattacatgtgattgtaaatgtgtggatgttttatatatgtataagtaatttgttgtataatatagtgctcaggctgcatttttaaaaatttgtatgaggtgggtttgatcaagataaatgggtgaaataaaaatgataaggttggtaatagttttgactatgcaataaataacattgatgatagaagtcttattgcgtttttcaaatatagaaaagatgattcctcttcatcattaagattaccatgttgcacttatagtaatataaaaaatgcccttttcttccaagctgtcatcagacttacagccaacaccttccttctcttccacatcttcacaacccttctggatcacaagcctaagtccactgaccacatcacctgtcacctggaccttgcacacttagtgatgctcctcattgcggtcttcttggcatctccagacctgtttaagtaactacatttgcagaataacttaaagtgcaaggcatttttctacatgtacagggtgatgaggagcctctccagctccatcacctttctcctgactgtgctccaggtcatcaccatcagccccagcacctcctggttggtgaagactaaacagaaattcacaggttacattttctactcctgtttcttcctatgggttctcagtttgtctctcagtagtaacctgctttcccccactgtggcttcttctaaagtgaccaagactgatgtgctaagtatcagtaaatactgctcactttcttacataagctacatcttctaatatgacaaagactgatgtgctaagttgtgctttatttcttgtcattctattattcctatacatataattacattcatattgctattattttctcttttttatatggttgtattcattctgctgaaaactccagttcactaatccagttcactaattctgtcgtcaactcagtctaattttatatttaactcacatattgtatattaaatttatttacttttaaattattccacttatatttgtctcttttccaaatttgcttgttcagtttatagttccctgctgtttcaaaattatttcgatatcctcttttccccacttgttttgacttaaagatttaaaatatatatccggccaagcacagtggctcatgcctgtaatcccaatactttgggaggccgaggcaggcagatcacttgatgtcaggagtttgagactagcctggccaacatggtgaaactttgtctgcagtaaaaatacaaaaatttagatgggcgtcgtggtgggcgcctgtagtcttagctactcgggaggctgaggcaggagaatcacttgaactcgggaggtggaggttgcagtgagctgagatcacgccaatgcactccagcctgggcaacagactgagactatctcaaaaaaataatataggtatttccaatatgccaagtttatgcagtgtctaatttcttcttaccccttttcctggtacctcattttcttctgtgcttcatacttttaatgaattaatttttgcaacaggatctggtttattctgccttggcagggtggtcctgagagtggcaggtgccaccctcttctgggcaaagggaggtccagaaggccagttagggccaatggtgggagaacctgggggtggagtggggttggggatttgggctacagcccctggaatgtggtgaaaccaggatgaggcccagaggcagctgtggtaggccagggcagggcggaaggcactggactggaaccaggcaaggtctacagggccaagatcccaggccacacgggcaccctgggaggcggagcacagtgtcccatgacacagagcatgaaacacaggcccagggctcacagtaagcacatgaacaagtggacacagattcacaggccagttgacatccagccatggtgggaccagaggtagacacggtgtcacatacagaccacagggaagacatggcacaatgggacagatggatgtgatggccacaatgcacagaccaggccacagagctcgagggatatgggaaggggccttttggcatttctgcactggaatcatgtgagacaagggtggccgggtgctctggaggtgctggggtggtcccctcacggcccctctgagcttactctgtcttccacactttgttgagcagcttcctcacctcatcatagatgataaacactatggccacatgcaggcagacccggcccaggcaggcaatagtgcccttgtagaaggtcttgtgcccttccctcaggatttgcagccacagtcccatgtgttctgcatttgtgcacctccaggtctcgcatctggggctcgatctcgtgcagaggagcatttccgaagacactggccgctcccacaatggctccgaagaacccagcgaccagcgggttcatgagtttgttggggctgtccactcggtaccagctgcgcagggatgtcaggacaaagaaacaagttgcctggttccagccctgcttcagcacggggcctgtggggccccggtaagtcccggtgttcccgcacaatctcctaaccctgtggaagaatcccctgtacttggatttggagaggtctggccatggattaacttcaccttgatggtctccatgggacataggaccaccacggcctcggccacgctagctcactggccgcaccgctgcccgccttgctgttcaccagtccctgggcatcccgcatctggttgctgaggaacgcctgacgccgccttgtggatgaagccgcagagcagggagctgaggctgcggcccaggcccaggctgccttggctgcgactgtgtgcctgcaggccccatgcccggtatccggtggatgcgagtgctagtccagctgcagctgcatcttcacgaactcggtggggaacgggatgcagattttttttttcttttccttccttccttccttccttccaacttccttccttccttcccctttctttctttcttttttttttttttttttttttgacagaattttgctcttgtcccccaggctggagtgcagtggcgcgatcttggctcactacaacctggattcaagcgattctcctgcctcagcctcccgagtagctgggattacaggcatgtgccaccattcccggctaatttttttgtctttttagtagagacggtgtttccccatgttggtcaggctggtctcaaacgcctgactcagatgatccgcccgcctcggccacccaaagtgctgagattacaggcttgaaccaccgcgcctggccctgtgatgtagattttgatgctgccagccaggctgcctgccgggatcgcctgccctggagcaggagcatcagccgtgcgttccaggacgcaggcatggcatgaccggcaggaggcggagtgcccggcgtctcttgggatcggagcctcctgaattccacgctgggaccttaatttggttttaacacaaataaagatctcacataaagataaaaggggatgtgttggcttgtaatttttgttaaaagcaatggtatatgttgtataggatagtgtattgggatcaacaggtttttggggttttttttcagcccactgacattgaaagggataaacagttttttggttattagtgagcagttttctctcaggccatagtgtaggggtttgtggtcatgtagatgagagataggctgggattaaaatttgttatggcagtaataagagcaacagagctagactctgtcaaaaaaaaaaaaaacatagttagtagaagaaaaaaatcataggattataggattagagcagaaaaaaataaaacaaaaactacaaaagattaatgaaaatatttggccttttagaaaagttaaaaattggcaaaccttcagcagactaaacattttttttttaattcaaataaaaaaacgagttaaaaaaggagatattacaacagataacacacaaattcaaagattggtttgtggctactataagcaactgtatgccaatacattggaaaatctaaaaaaaaaaaaaaaatagacaaactcctagagacatacaacctaccaagattaaacagtaaagaaatccaaaacctaaacagaccaataacaattaatgagattgaagctttaataaaaaaactcttccaggaaagaacagcccaggacctgatggcttcattactgaattttaccaaacatttcaagaagtaataccaattcctattcaaactattctgaaaaataaggaggagggaatactttcaaactcattctatgaggccagttttaccctgatatcaaaaccagacaaagatacatcaaaaaaaggaaactgcaggccaatatctctgataaatactgatgcaaaaatctcaacaaaatactagcaaacagaattcaacaatacattaaaaagattattcattatgaccaagtggggtgtatccctgggatgcaaacatagtttaatatacacaaatcaataaatgtgatatgtcatatcaccagaatgaggaaaacagcgtggtactagcataagaacaaacacatagaccagtgaaaaaggatagagaacccagcaacaaatccacacatttacagaaaactcatttttgacaaagatatcaagaacatacagtggggcaaagacagtctcttcaataaatggtgctggggaaactggatatccatatgcaaaagaataaaactggattcctatctcccaccatatccaaaaacaaatcaaaattaattaaacatgtgaatataagacctcaaattatataaaactactatatataaaaaagttgtgaaaaattttcaggacatcagtatgggcaaaaatttcttgagtaataccccacaaccataggcaacctaagcaaaaatagacaaatggaatcagatcaaggtgaaaagcttctgcacagctaaggaaacaatccacaaagagaagagacaacccacagaatgggagaaaatacttgcaaaccactcaactgacaagttaataatcagaatatagaaagagctcaaacaagtctatagaaaaacatctaataattcaattaaaatattggcaaaagatttgaagaggcatttctctaaagaaagcatacaaatgggaaacaggcatataaaagttgaacctcagagaaatgcaaatcagaactacagtgagatattatctcaccccagttgaaatgtcttatatccaaaagacagacattaacaaatgctgacgaggatgtggagaaaagggaacttttgtgcactgttggtggtaatgtaagttagtacaaccactataaaaaaaacattttgaaggtttcttaaaaaactaaaagtgagctaccatagctaccatgcaacccagcaatcccagtactgggtatatacccaaaagaaagaaaatcagcttgttgcttcactgtttacaatagctatgatttgaaagcaaactgtctaccaacagatgaatggattaaaaaaaatgtagcacatatatacaatggagtagtattcagccataaaaatgagattttgtcttttgcaacaatgtggataaaagtggagagtatgttaagtgaaataagtcagacacagaaagacaaacttggcatgttctcacttacctgtgggatctaaaaatcaaaacaattgaacccatggacgtggagagaagaggttagttttcttaacctctttgagaggttaagcaagatagtaggggctggcggaaaggtggggactgttaatgggtacaataaatagaataaatataacctactatttggtagcacaagatgactatagtcaataataatttaattgtacattttattttatattttatattttattttatatattttattttattgaggtagagtcttgctcttgtcacccaggctggagtgcaatggtgcagtcttgtctcactgcaacctttgcctcccaggtttaagcaattctcctgcctcagcctcctgagtggctgggattgcagccacctgccaccatgcccagctaattttttgtatttttagtagagatgggttttcaccacatgcccagccaattgcacattttaaactaagagagaataattagactgtaagacaaaaaataaatgcttaagtgggggagggtgtatcccattctctatgatgggagtattatgtatttcatgcctgtatcaaaacatctcatttatccccataaatatatacacctactgtgtacccacaaaagttaaataaattaaatttaaaaaattaaaaaataaaatagcatagaattaagtaggcccagaaatatgaggattttaatgaaatgataatacctaagtaataatcaatcaagaagtaaaaacaaagtcatacttcactcccatttttgtttctaatctatatgttttctactttaaagctgtagaattttctttttttcattgctaattatattttaatgtgactagtctgggtctattttttctaaaattttcagtttttctatataatttttctctaacttttagtttctttgtttatgccccttatatttttgagaagtgtctattcagatttttgcccattttaaaactggattatttaattattttctattgagttttttgtttcttttgtattctgcttatcaatcgcttgtcggatgtgtagcttgcacatattttctctcttatctcttttttctttttgagacagagtctctctcatcacccagcctagtgtgcagtggcacgatctcagctcactgcaacctctgcctcccagattcaagcgattctcctgcctcagcctcccaagtagctgggattacaggcgtgtgtcactgcgcccagctaatttttgtatttttagtagaaacagggtttctccatgctggccaggctggtcttaaactcctgacctcaggtgattcacctacctcggcctcgcatagtgctgggattacaggcataagccaccatgcccagccttattttctctcattttaggaattgtctcttcattttattgattgtttcctttgctgtgcagaagttttttgtatgatgtgatctcatttgtacattttactctcattccctgtgcttttgaaacattatttaaaaatctttgctcagatcaataacccgcagtgtttttctaaggtttttttgtggtagttttatagtttcacgtattcgatttaagtatttaatccatttctatttgatttttgtatggagtgagagataggggtctagtcttattcttctacctatggatattcagttttcccagcatcatttacagaaaagaccatcatttatccagtgtatgttattggtgtctttgtcaaaaatgagttcactacaaatgtatgaattttcttctggattcactattctgttctattggtctacatgtctgttttaatgtcagtaccatgctgttttggttagtatatctttacagactattttgaagccaagtagtgtggtggttccagttttgtttggttttgcttttgcttaagatgcctttgaatattcttttatgtggttttatataaatattagaattttgtttctacttctgtgaagaatgtcattggtattttgatgggattgcattaaatctgtaaattgatttggcagtatgaacattttaacaacattgattattttatttcatgcaatataaaataccttttcattttgtttcatcttctttaatttctttaatttatattttacagattcattatagaaatctttcccttatttagttgtttattcctacttatttgtaagtattgtaaagaaaattttttttcagaatgatttctattgggatatagaaatgctactaatttttgtatgttggttttctatcctgcattattacttaatttcaaatctctctttaaaatacattttataagaaagaaagaaataaaattcatagaaaaattttgtgactaacactgtcattattccaaaacttcaaaaccaagccaatataagatacatttggatgtaaaattacatataagtatatatatatgtatatacaatatgtacatatataataactgagaagattttatttcagaaatacagggcattccaagaagacaatcagcttatataatttaataaaataaaataaaacaacagcatttattgagtaaattattgtatacctttgtaacatttataaataacttaaagctgggcacagtggctcatgactataatcccagcactttgggaggccaaggcaggtggatcacctgaggtcaggagttaaaggccagcctggccaacatggtgaaatcccatctctactacaaatacaaaattagccgggcatggtggtgcacacctctaacccaagctacttgagaggctgaggcagtagaaatgcttgatcctgggaggcagaggttgcagtgagccgaaattgcttcattgcacttgagcctgggcaacaacagtgaaactccattgagtataaatggataataataataattaatgataatcacattattattataacttagaaaaatactctactagtgaacatttcaattattaatgataacaatgcatcagtatataagaataaaatataaatgaccaatgagcacatagatgcttagcatctcttttcattagaaaaatgcaaatcaaaaccacaattaaatgtcagtttacacgcactaggataggtatattcaagaaaagaaataaatgtggatgagaatgtggagaaattagaaccctcataccgtgctgatggcatggtaaaataatacagccattttggaaaatattttggcaggtcctccacaggttaagatagagttaccatatagctcagcaattctactcctgagtatataccaaacagaaataaaagcatatgcctacacaaaaactttgtattatgtttataggagcattgttataaatagccataaagtaggtatgacccaaatatctatgggtgaataaccaaataaagaaaatatggtattatctatacaatggaatattagccataaaaataaatacagtcctatgatatgtgttacaacatggataaataataaaaacatatgctaaatgagaaaaaaaacaaagaaaaaagttcacatatttctataaaatgactagaatagacaactaaagatagaaagtggattagtcgttaccagggaaattgggtgggagaataagaaatgactgcttgatggatatggagttcttttgtgaaagggtgatgaaactattttggaatttgatagtggtgacagttgtgtagcattgtaaatagactgaaaaacactgaattttacactttaaatcggttaatacattgaactctatgttatgtaaattttagctgactgaaacaatttaacaaacaaagaaaaatagactatgaaacaagagaacaactgagggagccctacaggctccaggacaatgtggggggcctcagaagccttctgtgcttcctgtttgcctccactattctgaggtatccagttaactccccaggcctcctcatcccagcctggaaaatgactttagctccactcaaaaaaacaaacaaacaaaccaaagctctgacagggatggtcttgtccttgggcctcggagcagtggtctgatgctctgccacattctacagtagcctgtgtgctcagtcccacaaacccccaggccactttctgctctgaaagaccttcagaggatacagagcaatttccaaggtcagctcacttctttaagcctttgaaatttaggggccacccaggtcaattatgtcagtttatagagaaaaaaaaataaggttttcactactgtattcctctccatactgggtatagggggattcttcctaattttaattatgcacagcaatgaatgcagaaaacaagtttttgtcctctgaaggctatcctggggatggccacagcccaggcaaatccatgggaaccttgaggttcccaagccattggcctgttatcttttcccacccccgtgttatgggtcttgggcatgttaccaggagatggggtgcccctaccttatggcaaagctgccccgatcctctctttcctttcttcttgtcactccatcagtattaactcatcttctgatctttaacctgagaagtctgtgtgtgtttttttgtgtgtgtgcgcacatgtgtgtttatgcccaaacctgtacgcgtctaatggtgcagacgtgagattgcatcatatgatgagaaaattggcaggaatccccaggatttcagggattcattcccaaagcaaaccccgtgagagagttgagccctggcctaggatgtcagaatgctcttttattctctggactctgcccactttatgttctctccatatcccagtttcttctctccatatcctggagagaagtctcggcttctctccagatcccagttttccaattatccagtgaggtgttagatgtcaaagcgcttaagccacaactcagcatgcacatggtccaagctgcctgccaactaggatggatgtagcagggctgtgatcagggtgtgcccagatcttccttactcgagcagaagtagatgggttctgcagtgggcagctggaccttctgtccaagaagggtcgtgcacacaggatctttaaaggcccacagacaatgggtgcatgtgagccccacctccatcccccaacagcttcccatggagcataccaatttttcccctgtcctctgcatctggaaggtggtgacatcctcactgaacacatagactgatggacccttcatggtggagtagtcccacgaagagaatctgggatgctattaactgtacaagggactatggatgtgggccatgtgaaaacactagaacttcagaattaaatcttcctcactgcagcctgtggggaaaagaaagagagatcagactgttactgtgtctatgtagaaagaagtagacataagagactccattttgttctgtactaagagaaattcttctgccttgagatgctgttaatctgtaaccctagccccaaccctgtgcttgcagagacatgtgctgtgttgactcaaggtttaatggatttagggctatgcaggatgtgctttgttaaaaaagtgcttgatgagttcatgtcctttgtatggacatgggtgaaactggaaaccatcattctcagcaaactatcacaaggacgaaaaaccaaacaccgcatgttctcattcataggtgggaattgaacaatgagaacacatggacacaggaaggggaacatcactcaccggggactgttgtggggtggggggagaggtgagggatagcattaggagatacacctaatgctaaatgatgagttaatgggcgcagcacaccaacatggcacatgtatacatatgtaacaaacctgcaccttgtgcacatgtaccctaaaacttaaagtatagtaataaaaaaaaagtgcttgaagccagtatgcttgttaaaagtcatcaccattctctaatcttaagtacccagggacacaatacactgcggaaggccacagggacctctgcctaggaaagccaggtattgtccaagttttctccccatgtgatagcatgagatatggcctcatgggaagggaaagacctgaccatcccccagcctgacacccgtaaagtgtctgtgctgaggaggattagtaaaagaggaagacctctttgcagttgagataagaggaaggcatctgtctcctgcttgtccctgggcaatggaatgtctcggtgtaaaacctgattgtatgttctatttcctgagataggagaaaaccagccttagggctggaggtgagacatgctagcggcagtactgctctttaatgcatcaagatgtttgtgtacgtgcacatcaaagcacagcacctttccttaaacacagagatctttgttcacatgttttcctgctgaccctctcctcactattaccctattgtcctgccacatgcccctctctgagatggtagagataatgaacaataaatactgtgggagctcagagaccagtgctggtgcaggtcctccttatgttgagcaccggtcccctgggcccacttttctttctctatactttgtctctgtctcttatttcttttctcagtctctcattccacctgacaagaaacacctacaggtgcggaagggcaggccaccccttcacagccttccaccactatacagataggagaatgtcttaggaaggagacatgtattatccaagattatacaaggattccatggcaaagctagcactttggttaggattacatttgcccacatatagaagaaaacccaatataatagtagtgcagaccagagagaaaatgctttctttctcataaataagaatcctagagctgggcagtgcatgttgactctgatctgtgcatcaaggcagtcaaaaataatctatctttttgctaatttttttctttttttaacttttattttaagtttaggggtacatgtgcaggatgtgcaagtttgttacatatgtaaatatgtgtcatgaaggttgattgtacagattattttatcacccagtcattaagcctactctccactagttattttttctgcttctctccctcctctcaccctccaactcctgataggccccagtgtgtgttgttcccttctctgtgtctgggtgttctcatcatctagctcccacttataagtgagaacatgtggtatctggctttctgttcctgtgttagtttactaaggaaaatggtctccagctccatccatccatgtccctacaaaggacatgatcctgttcctttttgtggctgcatagtactccatggtgtatgtgtaatacattttcttcatccagtctattattgacgaacatgtgggttgattcaatgtctttgctattgtgaatagggcagcaataaatgtgtgcatgcatatgtcttcataacagaatgacatattcctttgggtatatactcagtactaaggttgctgagtcaaagggtatttttttctttaggtctttgaagaatcaccacacagtcttccacaatggttgaactcatttacactccaatgaacagggtaaaaatgttccttttctccacaactttgccagcatctgctattttttgacagtttaataatagccattttattgatataaaatggtatctcattgttttttggatttgcatttctctaatgatcagtgatgttgaactttttttcatatgcttgttggctgcatgtatgtcttcttttaagaagtgtctcttcatgtcctttgcccacgtttcaataaggttgtttgatttttcttgtaaatttgagttccatatagatgctagaaattggatctttgtcagatgcatggtttgcaaaatttttctcccattctatacgttgtctgtttacactgttgatagtttattttgctgtgcagaacatcagtttattttgctgtgcagaacatctttagtttaattagatcccatttgtcaatgtttcctttgctccaattgctttcggcatcttcatcataaaatatttgcccgtgcctatgtcctgaatggtatttcctaggttgtcttccaaagtttttataattttgggttttacatttaacttgttaaactatcttgagttaatttctgtatacggtgttaggaaggagttcagtttatttctttctttcttttttaattttagtttaagttccgggatacaagtgcagaacatataggtttgttacataggtatacatgtgccatggtggtttgctgcacctatcagctcgtcatccaggcttcaagccccacatgcattagctatttgccctaatgctctccctcccctcaccccctactgtctgattagccccagtgtgtgttgtttccctcccagtgtccatgtgttcttattgttcaactcacacttatgagtgagaacatgccatgtttggttttctgttcttgtgttagtttgctgacaatgatggaggaaggggttcagtttcaattttctgcatatggctatccagttaacccagcatcatttactgaatagggagccctttttccattggttgtttttgtcaggtttgtcaaagatcagatagttgtaggtgcgcagtcttatttctgggttctctattctgtttcattggtctacatgtctgttcttgtaccagcaccatactgttttggttactgtagccccgtagcatagtttgaagttgggtagcatgatgtctccagctttgttcttttttgcttaggattgtcttgactattaaggctcttttttggtttcatataaattttaaaataaatttttctagctttgtgaaaaatgtcagtggtagtttaatgggaatagtattaaatctgtaagtttctttggggagcatggccattttaacaatattaatttttcctatccataagcatgaaatgtttttctatttgtttatgtcatccctgatttctttgagcagtagttcatagttctccttgtacagacttttcacttcccttgttagatgcattcctaggtgttttgttctttttgtggcaatagtgaatgggcgttcattcatgattttcctcttggattgaccattgttggtgtataagaattctagtgacttttctttggaaggccgaggcgtgcggatcatgaagtcaggagattgagaccatcctggctaacacggtgaaaccctgtctctactaaaattacaaaaaattagctgggcgtggtggtgggcacctgtagtcccagctagttgggaggctgaggcaggagaatggcgtggacctgggaggtggagcttgcagtgagccgagatcatgccactgcactccagcctgggcaacagagcgagactccttttcaaaaaaaaagaatgctagtgatttttgcatattgattttgtatcttgagactatgctaaagatgtttatcagcttaagaagctttgggggtgagacaatggagttttctggatataagatcatgtcatctgccatcaagtgtagtttaacttcctctgttttgatttgaatgccttttatttgtttctcttgccagtaaattccaatactatcttaaataggagtggtgagagagggcatccttgacttgtgctggttttaaagggaaatgctttcagcctttgctctttcagtatgatgttggttgtgggtttggcatatatggcttttactattttgaggtatgttttctcaatatctcatttattgggagttttaaacatgaatggatgttgaattttattgaaagctttttctgcatctattgagataatcatgtcgtttttgtctttagttctgtttatgtgatgaatcacatattgatttgtgtaggttgaaacaacattgcatcccacgaatacagcctacttgattgtggtggataagatttttgatgtgctgctggatttggattaccagtattttgttgagaatgtttgcatcagtgttcatcaagaatattggcctgaagtttcttcttttgtctgccatgttttggtaccagtatgatctggtctcatagaaagagttagggagaataccttctgtttcaattttttgaaatagttttagtagaaattgtaccagttcttctttgtatatcggggagcattcagctgttaatttttctggtcctgtgcttttaatggttggtatgctatttattgctgcctcaatttcagagcagttatttctcttttgagggattgaatttctttctggtttgtcttgggaggatgtatgtgttcagaaatttatccatttctactaagatttttagcttatgtgcatagagttgtttacaatattctttaatggttatttttatttctgtggagtcagtggtaatttattatttctgactgtgtttatttgaatttttgatctttttgaatttggctacagtaaccaaaacagcatagtactggtaccaaaacagagatatagaccaatggaacagaacagagccctcagaaataatgccacatatctacaactatctgatctttcacaaacctgacaaaaataagaaatggggaaaggattccctatttaataaatggtgcttggaaaactggctagccatatgtagaaagctgaaactggatcccttccttacaccttatacaaaaattaattcaagatggattaaagacttaaatgttagacctaaaatcataaaaaccctagaagaaaacccaggcaataccattcaggacataggcatgggcaaggacttcatgtctaaaacaccaaaagcaatggcaacaaaagccaaaattgacaaatatgatctaattaaactaaagagcttctgcacagcaaaagaaactaccatcagagtgaacaggcaacctacagaatgggaaaaaaattttgcaacctcctcatctgacaaagggctaatatccagaatctacaatgagctcaaacaaatttacaagaaaaaaaaaaaaaaaaccccatcaaaaagtggacgaaggatatgaacagacacttctcaaaagaagacatttatgcagccaaaacacacatgaaaaaatgctcatcatccctggccatcagacaaatgcaaatcaaaaccacaatgagataccatctcacaccagttagaatggcaatcattaaaaagtcaggaaacaacaggtgctggagaggatgtggagaaataggaacacttttacactgttggtgggactgtaaactagttcaaccattgtggaagtcagtgtggcgattcctcagggatctagaactagaaatatcatttgacccagccatcccattactgggtatatacccaaaggattataaatcatgctgctatgaagacacatgcacacatatgtttatagcggcactattcacaatagcaaagacttggaaccaacctaaatgtccaacaatagactggattaagaaaatgtggcacatacacacatggaatactatgcagccataaaaaatgatgagttcatgtcctttgtagggacatggatgaaactggaaaccatcattctcagcaaactatcgcaaggacaaaaaaccaaacaccgcatgttctcactcataggtgggaattgaacaatgagaacacatggacataggaaggggaacatcacacaccggggcctgttatgggatgggtgggtggggggagggatagcattaggagatatacctaacgctaaatgacgagttaatgggtgcagcacaccaacatggcacatgtatacatatgtaacaaacctgcatgttgtgcacgtgtaccctaaaacttaaagtataataataataatttttttttaaaaaaaaaagaatgttaaatattggccctcaatcttttttagcttgtagagttttcagtgagaggtctgctcttagtctgatgggcttcactttgtaggtgacctggcctttctctcttgctgcccttaatatttttttcattttaactttggagaatctgataattatatgttttgagcatgatcttttcatggagtatcctactggagttctctgcattttctgaattttaatgttgacctgtatagcaaggctggggatattctcatggacgatatcctgaaatattttttaaaaattggctccattctccccagctctcttaggtataccaatcagttataaatttggtctctttagataatcccatattgctcacaggttttgttcattccttttgattctcttttttctattcttgtctgcctgtcttatttcagaaagacagtcttcaagagctgagattctcccatgttcttggtctattctgatattaatatttgtgattgcattatgaaattactgtattgtgtttttcagctctatcaggttgcttagattcttctctatccaggctaatttgtttgtcagcttttgcaatgttatattgtaattttgagttttcttgcattgagttagaacatgctcctttagctcagtgaagttcatttttatccacattctggggtctacttctgttatttcagccatctcagcctcagccctattctgaacccttgttggagaagtaatgttgtcatttggaggagtgaaggcactctagctttttgagtttttagtattcttgtgctgatcctttctcacttttgtgtgcttatctacctttaatctttgaggttgctgacctttgaatgggatttttgtttgttttcctttcaactgtttggccatgttgtgtagggctgttgcagttctttgggcatctgccccagtctgtagtcatctaggatttttcagtatctggaggtatcattagtgaaggctgtgaaacaacaaatcagcccacccctttctctgggaggtccatctcaggggaggtgcagacctgttgctggcttgaacacacctgtaggaggtgactggagaccccttttgggaggtctcacctatccagggggaacaggattggggacccacttaaagaagcagtctagccccactttcatagagcagccatgctatgctggggtaccacttctgcccctcatcaggttgtgctctctaaagcctggaggctgaaaaagctaagttgctgaaacagcaaagttgatggcccacccctatctctaggaactctgtcccagaaagttttcaaacttctgttggccagagaacatcagtggaagtggctggaggccctggttgggaagtcccactcagagataaggggcatatcaggatcctacctaaagaagcagtctgatcacatcatggtagagccactgtgctgtgctgggggattgcttctgccccctgtatggtttggggtctcctaagcccacaggctggaatggctgagttgtccaaacagcaaatgtggtggcccacttctcccactggacactgcatccagggagaaagcaaaattctgtctgctggagaatatggaaggggctggctggaggcccgagtaggaggccccaccctgagatgagaaatgtgtcagggtcccacttaaacaagcagtctggccacattttggtagagccactgtgctgtgccagggcttcccttcatctgccatcagttttgcttggactctcctaaacccacaggctggaaaggctgagtcatccaaacagcaagtatggcagtctgcctctgtctccagaactttgtctcatcccaggtaggtaaaacactgttactgggggctggctggaattccaagccagtgggtcttatcgggtgaggcatcatggatgtggggcccacagactgatgttgttcatccctgtggtttaggcttcctttctgggatttttatggtggtcccacctcctgttttgtccgagttgcagtcacctttgctggagatcctggagccggagtgtgtaaagcttctgagattctatttgtctgagcagtttctctggcaagaccatgcagctctgtgtgtcagaccaaaggccctggtgaaatgggttcatgagaaaatctcctgacctgagggataaaaagatccatgggagaagtgtggtttcacagggtcacacattcactcaccacttccctggacagggtagattcccttcgctctgtgtcacttctaggtgggcagttgccatgccctgctcttctccattctgcatgggttgagttgtttccttcattattcccagtgcaaatacctgggtgtttcagctgaaggtgttgtatttactctcctcctttgttcctttccatgagagccacacaccatattacttctagtcagccatcctggcacccttttctgctacaatatttcagtagatggtttttatcctgtaggctgtctcatgggccaagatggctgtaggaccgtcagcctacaccagcaaccatgtgcatttcaaagatcaagaaggaggaaagatgcaaggtcaaagtggctcacacagctgtgtcagcctcatctgaacagtctccccaaagtcccgtcaatacttctggttacacccaattgtcttgaatgttttctagtcattattagcttcaataggggtcaggaactataaccattgtgtatggtaagttgctgtttgaataaaactgaatctctgtctttaagaatgaaagaaaaataaaaactatggcaataaccagtgctctttttctgcactaaattcaaagataacaaggagaaaatggagtttgtctcaggtgaagtggcacttattttccaagcaaagcctcttttggtgtttatttattttcagatcagatgggaaaaagtcttggttctgacaagcactctttttatgaccaaaggttagttaagcttaacttaactctcttcttgacttagtcaaccttggcttgttgccctgctcctggtctgagaagcttattttcagaaatgctgctaagattgcttagtaaaaatccacatattttttacatctactaaaatcctcattccccttccctgatatttaagtccttagcctgcctgtaaacagaattctgttacaaaaaaaaattcctcctcctttggtattttatcaaatttatttcagtaattttttatccactgatttatttgcttattgattataaatcctgagttgtctgtgttcagagttatgatcgatttctgaaccgtattacaatggccataacatctactgcaatagtgttaaagtctttcttccgaatttttaacaaatgtcataatttttttaatttgacagtttcccaacaggatgtttgagtataaaaccagttttcagttccttcccaaaaatgatgtcaaccactgtgtagttgtatctgcctgacccttgcgtgtctaaaaaagtatgttcttatttaaaggggtgagggtggaagattatagagctaacatttttctaaaatgctgagtcataattgaaaccatacaaataaaagaggtagaatgcttggattccaacatttttaaccctgaggatacttcaatgtccatgatccatattactgtgaagataatgcacaaaaaagaaaactgatgattaaaattgaacatgatacaacgtatcattgactaaaaactaacataagagaaaaatattctcaaaaacatttgggtatccacagtttgacccaggaaagttgactgggtagatataatggtccatatagaaaatttatagaagcagaatctgtaaattatgatgtgaaaaagtcagataatttttatttaaatatagtgatcatgataacaataattcagttgaattaaaaattagaacagattaacttgaatttgttatgttctataaaatataaataatggagttaaaatgtcatatatgagtttgctctggaaaacacattctcaaataaataaaatctgattttatttgattatttgactgattttatctgtttattaaacccataataaaattattttgtgtggttcaaattctctaacataacatagtatggtcaaaatgaaagggtaaaaattgcaagaccgacttaacatttgtcatcttaaatgtactataaggatgccttttaaattaattcagtgattaggtttttaagtgcatggtttaggttatactgaagtgtcaaataccatccccgtaatttgcagtagattaacagcatattttagcacacataacagtgttattgagtgaccaagttgaaaaagcacctcctttgcaagtggtaattcaggaactcagagttttttcattatttgccttcaccatccatgagtcttggttgccctttgtgctcagtccccttaaaataaagtactttaagaaatacatgtgggaagatttaatggactcaacttaatgtggttcacatctgtctcactccatcagcattatcaataactggtcacatttccacatctaaggcaaaggaggttaagaaatgtaattcatctgtgcctaacaaaaggaagaatagatttttatgaacgacaagagttttctgttacaatatgtcactcatatggatttactgtgtttctcaaatatttattgaacatctattatagccaagtaccgtgataagggctgaagggaggacagagagctgagacagcagagtcctagtatgagagaaactcacagtctaagaaaataagaaaatacatggtatgaagtgcctgctgtcataagaaagaaaagaataatgtgaaaaggctctgaaagtttagttaattattctactttgggaaacttcctgaagatgatagcaagtaagatccactctcaaagataagtaagatttagttgatagagaaagatggatgcagaaatggttgagcaatggcagggtgataggatgacagaggtggctaccataacatgggacagaaagctttattaacttggcagtagggtggggtagggttggaattatcccaaagtcaatccttactcaaagtgaatcttttcactctgatctcactcatgttggaatagttctacaagctcttgtgagactgtattgtacactgtgggagtgaagaacagagtgtgggtgactcctaccttcatagaatttaatatcccatttgtctcaatatagccagtgccaagagtcatttacatagaagtttcaaatgcttgagagagactggcctctgaactaaaaagagatctctgtctggacacaggtggaactgtaaaatgttcactctttgtccccagttcgttttcatagaattcttcatacctgtttctatgaggaatgaactggatgtgtttgaagacaagctgaagagctacgttacctctgtgaacaaagtggggatgctggctccattaaccctgcaggtgaaaaagctgatcaaccccaggtcatattttgtaaacatgtttaaggctaaattaaaatttgaacatgctctaagaattttttttcaatagcctgtttatttttaatgcctattggaaaaattgaaatgaatatttaatttcaaatttggacaaaataaaacaccaaacacttttttcattaagatgctaaagaaagtttatttatatcttttgaactttgtcttaaattcatttgtatcttaaaatggaagctttctttgaaaactacatattctagctcactgacattgaatggaaagctattaactattccccaatgaggaaggatcttctaaaatggggctaaaatacatgaaataaatggtttccaatagctcctgcagctttgccaagtccatgtcaaaaaattacatgtatgggtttatttcctgacttttaattctattccattaatgtgtttgtattgatcttggatcctacaactttgcagaatttgattattagtgttaacagttctattgttattaattaggattttaattttatgtataaaattataacatctatatatagaaataagcttttttcttttccaattggagtgtttctgtttttgtgttgcccaattattctggccagatttctattacaatgttgatcagaagtgaggaatgcaggtatccttgccttgttcccgattttagggggaaagcttttaatctttcatcactgcatataatggtagttttgagttttttatacgtgccttttattatgttgaggaagttttagtctatatctagtttactaagtgctcttatcataaaagagttttggattatgccaaattttttctctatcaattgacataatcatgttttttgtaaaattcattctattgagttggtatattgcactgattgattgcaatttttaaagaatttgagaaaaattgtagttacagcttttaatgtttaaaacaatttatcagtggagccatctggttccagacttttctttgttagtatgttagtatgtttttgataacttatgcggtcttttacttattacaaatggtattagagttattcagagaaatagaagcaatagaataaatatctacatctatactatatctttgtgtgtgtgttcatctatgtatatgtgttaatatatgagacagagccctttagagttgtcttggtggtgtctgggcaggggtccttcatcagccatctctgggctggtttggagaaccctctgttcttccactcacctcatttcaatgctggccctttttggcagcagcaagcttctggccttcaagagagtaaacatggttaccccactaacacctttttgccagtctcctgtgtggagctctgcaaagacagtaactggtagacagacctggaagcctcagagctattcctggccatcactgctgctcctcataccccactcaaccttctgctccccagattaggcatagacttacgtctacacagaacttcagccttggaaagcaccagacgacagctccagggctcagaacaatctttgcaccagcacttgcctccctactttgccagccatgaccaggtgtgtaaacatgatgagccaccaggattctaacctcccaacaatctcttcctgttcaggatgagccagccccacatgacattcccctacacaccatatttgacattaaatatttatccttttgtatttggcttattttacatagtataacatcttcaatgttcatccatgtagcattctttttttgagatggagtctctctttgtcacccaggctggagcgcacagcaatgcaatcctgactcgctgctgcctcaacttccccgggctcaggtgattctcctacctcagatgatcctccctgtggatgggactagagggacacaccatcaagtccagtaaatttttgtattttttgtagagctgggatttgctatgttgcacaagctggtctcaaactcctagactcaagagattctctcatctttgcctcccaaagtttggggattataagcataagccaccacactcatgagcagtgcactcattttaaggttaaataatattccattgtacgtatataccatattttctgtatctgtttatttcttagaagatatctgggtttgtttttacatttagtactataaatgatgcttctataaaaattggtgtgaaagtatcagtgcataagtgaataaaattttaaaacctgaacacatctctgcatgcagttcttagattgaataacagaggccagacacggtggctcacacctgtaatcccagaattttgggaggctgaggtgggcagatcgcttgagctcaggagtttgagaccagcctgggcaacatggaggaattccgtctctactataagtacaaaaatttgctgggcatggtggtacatgctgatagtcccagctattcgggagacggaggcacaagaattgcttaagccctggaggcagaggttgcagcttaagtccctacttttaattattttggagatacacctgtaatggagttgctggaacatacggtaattctatgtagaactttctgataaactgccaaactatttttcacagtcaataaaccattttatattctcaccagcaatacaccagggtttcacttcctccacatcctagctaatacttgttctttttcatttctgttgttttgttttttatatagtcaccctaatatgcgtaaagtgatatgtcattgtggttttgcatactaagaaggcaacctactttatcatgatggattatctttttgacgtgctgctggattcagtttgcaagtattttggtgagaggttttgcattaattttcatcaaggacattggcctaaagttttctattttcattgtgtctctgccagggtttggtgtcaagatgatgctggcctcatggaatgagttggggaggagactctcctcaatttttggggatagtttctgtaggaattgtaccagctcttctttatacatttggtagaatttggctgcaaatccataaggtccggggctttttttgattggcaagctacttattactgatgcaatttcagagcgtggtattggtctgttcatggaatcaatgtcttcctggctctgtcttgggagggcatgtgtgtccaggaatttatctatctcttctaagtttcctagtttgtgtgtatagaggtgttcacagtagtagtactgaccctacagaaataaaaacaaccatcagaaaccaataaagttttaacatcaattattttcatgtcttgaatccatttttatttaatttttgtacatggaatgtgataaagattcaattttacttttttgttgttttgagacagagtttcgcatcacccaagctggagtgcaatggtgtgatctcagctcgctgcaacttccacctcccaggttcaagcaattctcctgcttcagcctcccaagtagctgggattacaggcacctgccacaacacctggctaatttttgtatttttagtagagatggggtttcaccatgttggccaggctgatcttgaactcctgacctcaggtgatccacctgccttggcctcccaaagtgctgggattacaagcgtgagccaccacacccggccaactttactgttttaaatgtgggcttgttttccgagaatcacttgttgaacagagtgtctttctttacaaaatggtttaggcacccttgtcaaaaggcaaccaataatttatgcaaggttttttcttctgagttatctattctatttctttggtctctatccttgttcttataccaatatcaaactgttttaattacagtagctttgtgtgttctgaaatttaaaattgtgagcctttcactttggtcttttcaagattattttggccattcagagtaccctcaaattccatataaattttagaatgggctattccatttacgcagaaaaaagttggaaaaaataaaaagttgggattacatttgtacactactttgggtaatattgtcatcttaacattattaagtcttccagtccatgaacatggaattccttgacacttatttaagtctatttccgaaatattcccatcctgtagtcttcattgcacaggtttttacttcctttttaaatttatcgctaagtattatattattttaatgttgttgcaaacaattgttttcttaatttcctttcaaatagttccttgttggtatatggaaatgcagtttatatttccgtgtagtaaaaataattattttgtctttcaaatctagattagcgattcactcagaataaatatgctgtatacattggtagtcatttaactttttccaataagctaaccaatttcagcatgttctaaatatgtaaaaatgttaaattgtgttttattttcatttactctcagctgtcattcactcacccagaattacattacttcacacaaagaacttccattactgtaaagtccctggtaattgtatttcttcctgtatctttcaatctttagcaattccacaacacaaaacaaccaaagttagtctttatgtcaaaaatcttcaatggatatttttcatcagaggattccttagtgcaacatttaatggaacagatgcatgctgctgaaatataattctccaaaagtctcttagagtttgttgttttgttatttattacatcatatatctgtcctgttccagattatttttcaaagatttttgtacacaaatagcctggaaaaagagtagtagtttttctcttcaggtgaatgacagataaattactcaaccaatatgataaagacaatgtttgtctgtgaggcaaagattggacaggtttgcatgtgaactactttaaaaagattagggtttctttatcttgagattactcggctgtgacacaaatctttcccatgtgcaatgtccatctgagccttttgaaatcccttttaaaaatcgagtatagacagggagaactaatacaaatatgaagcttttgccttcagttatgcagaaaataagtaaatatttttgtcatacttaagtgtctcatgccttttaccagcatccatgaaactagaaggtttataggttggtttacaaattaggtagaatctacgattcttcacaattatttagttttggtgatgaaaatatgatgctgagataaacacaactttctaaaagggggagagaaacaaatacttgaagagttttcaagggaatatgagaagtctccccaggtccaacagcaaattctctgagccaagtggttagtgaggtgaaacaagagctctacactctgctgtctgctaaagaggctgatgtgtgggaggattaaaactaggagcctgagtgctttgcatgttcatgtttctcctgctagaaggatcaagcagtctttaaagctgatgttgaggcttggttgagtccaaaacactagaagtttatgcggttgagctatgagcagtctaaaggctgctaaaagctaaattaaatgggtcttgttagtgcctttttttttttgagacggagtttcatgcttttcacccaggctggagagcaatggtgcaatctcagctcactgcaacttctgcctgccaggttcaagtgattcttctgcctcagcctccttagagctgggattacaggcacctgccaccacacccagctaatttttgtatttttagtagagtctgggtttcaccatgttgtccaggctggtctcgaactcctgaccttgggtgatccacccgccttggcctcccaaagtgctgggattacaggcctgaaccaccacgcccagccgttagtcccttctttacccagatgaaggttctcactccctctgcactcctaaattttttccttcatctatagccaacttaagcaactttaaatattaaactacataggattggagatttggagggggaaactcaagcttttgtagttccgttagatacaggtatccaatttaccattctgtgtagtctcctagggtgcacagggagatataggtacaagggtgggtggaagtgctgacaagtgtagggtcaagaatgattacaaagtggtagaaagtaaaaagttcttaatcctgggtactcttaaaatgtaaggcatcacagaccttagtatagcaaaccaagagagaaaaaaatctaccaaccacccaatccctctgcatgctaatcacttctggccccttgcgccctcatgctcctgcccaggggatagtgctatcctactttagcccttgcctcaaacaaatattaaacactacggtctgtgcttacatagaaaaagctgagcagagggaaaaataagttggattaattccacacatgcttcatgactctcataaattacaaactgtagggtggacatattaacaatcagagttctgtaaacatagattttattttattttattttattttattttattttatttatcttattttattttattttattttattttattttattttattttattttattttatgtttgagagagggtctcactttcacccaggttgaagtgcagtggtgtaatctcagctcaatgcaaacttcatctcctgggctcaagtgatcctcccaaatagctgtaactatggatgtgcaccatcacacgcgggtaatttttttactttttgtagagatgtggttttgccatgtagcccaagctagtctcgaactcctgagctcaactgagccattcacctcagcctccaaaagtgctaggattacaggagtgagccatcacacctggcagagttctgtaagtatagattttaatgagcattatgtggcaatagatgttcttagatttatagacgtaaatatttaattgatattaagtacaaccccaaggctctttttttaaagttctctgattactactgtgagttaggcaagtcaagtcagatccttctgctttgactgatgataaaaataggcagagagtgtgagtcaccaggcagtggggagcagagaaaaaagtttggactgtacttcattgatctatttcttctctgattggcacttttctgtctctccacaaagttcaacaacttgtgatttttcatagtttgtgtctgaagtgtccagaaatgttaataggttccagctgagctttgcctttggaataatttactatctgttgtctacagaagaaaatatatgcagctatttaaggacatattatgtgccaagcactgtgttaagcagtagcttacaggtgcgagttgacttaatctttagggacactcaaggatcaatggactcattattccaattttacatagaaggataaaatgttgtctcattgtgagtggctgcttagaaagaataaatgaataaccaaagctacatggctggtaagtggtaaactggaatctcaaaaaccaatcatttaatcctatccttttggcaagctgagcagccccttgccagtggtctaaaacaatgccaggaaaagagggggtgacaattgtgcatttgataaacaggtaaaagcctggtgttgatattcagaaaaaaaactattcaattattgtaacacttgacatccatttttaacttaatgcagcgcataaaagtgtttacaaaagttgcacatgcttttgagatcaacatttgggagggatttacatagaatatacatttaccttaaaaaacatgcttagccactggtaactctatgtctatcaaattaggtgtttcaactaagaatgagattgctaattatgtttttaatatattttaaataagttcagtcattactattcagtgatcactaataacaggttggatacatcttagaccagatagcacatgtgtgagtgtgagtgtgtgtgcaatgcatattttgcctacgtttctgtatataatatatatttatctatatattatacataatatatataatatatagcatatgtaaagataatacacagatatatattacatgacgaaaacatgtattctctttgtattagtgtttaatttactagtgtccagaagaaggaaagaatacatttcacaagtaaaatcaaagcactacttttttttttttttttttttttttgagacagagtctcgctttgtcgcccaggctggagtgcagtggcccgatctcggctcactgcaaccttcccctcccaggttcaagcaattctcctgcctcagcctcccgagtagctgtgactacaggtgcctgccaccacgcccagctaatttttttgtatttttagtagagtaattaagtaaaattaacaagaacataattttttttgtatatttttgtatatttcgctattgtttttcccatcaggttttaatctttatttacaaactcttaccagctggtcctggtggctcatgcctgtaatcccaaaactttgggaccccaaggcaggtggatcacctgaggtcaggagttcgagaccagcctggacaacatggtgaaaccctgtctctactaaaaatgcaaaaaattagtcaggtattgtgtcaggtgcctgtaatcccagtgactctggaggctgaggcaggagaatcacttgaacacggaaggtggaagtttcagtgagctgagattgcaccattccactccagcctgggcaacaaagagtgaaactccatctcaaaaaaaaaaaaaaaaaagaaagaaaaagaaaaagaaaaaaataaaataaaaactcttgtctttttaaagatctattctagactctccacccaaactcaattaccaaaactctaggtttctgaggtgtttgattttcgttcctgactcctgaatagcacctctgaacctacctagggcctggagagccttgccaaactgaagggggaaatacaggcctggctgcctttttcacctgctgattgtagagccacagcgtcttgagtgaacatagggagtaaccaggaagctgtaacagcaggccttgggtaagaccaagcactctgctggattcaggtctgacctaatgcagtcatagttgtgatggccacagagatgcactttcatgtgtctcagaacacacacacacacacacacacacacacacacacagagaaactccatttgtttgggagaaagtaagggaagaaaagaagagtctctgcctggtaattcagaaaattctcctggatcttgttcaagacaatcttgttcaaagccatcaaggtagtacctctgtgagtctgcaagaaccacattgttaccgggcttgaggagtcccctaaagtagaaaaatcttagatcacaacacccaagtcctttcaaatatctctgaagccttcccaagaacaatgactacaaacaatcccagggagtgttgactataacaaatatcaaaatcttcaatggtgagacacccacaaagatctactggcatcaacaaatgatttaaaataatacttaaccaaatgaactaaaaaaggaaccagggacgaatcctgcagaaacagaaatatgtgattttcctgatagaaaattcaaaatggctgtgtcaaggaaacaaagaaattcaagataacaaagagaaggaattcagaattctctcagatatatttaacatgcagaaaaaaataattttaaaaagagtcaaggagaaattttggagatacaaatgcaatgcaataactgaagaatgcatcagagtcttttaatagtagaattgatcaagcagaaaaaagaattagtgagcctcaagacaggctatttgaaaatacagagtcagaggagacaaaagaaaaaagaataaacaactcacagtgtagatctcagtccaaggctgaggacatgagaacctggaatttcacttgtgtaggtcctggagtcaaaaggcctggagtcctggagttctgatatataaggataggaaaagaagagtgtgcccgaatagggagggagggagagagagaaagagaaagagagagagagagagcaattcttctatattgtcttttcaatttttttttaattttatttttgagatggagtttcactcttgttgcccaggctggagtacagtggtgtgatctcggctcactgcaacctcctctccccgggttcaagttattctcctgcttcgaccttccaattagcaagtattacaggtgcctgccaccatgcccggtaaattttttgtatttttaatagagatggggttacaacacgttggccaggctggtctcgaactcctgacctcaggtgatccacccacctcggcctcccaaagtgctggtattacaggtattagccaccacacccagcctttcttccttttttgtcttggctctttactaattgtatgatttctgcccacattaagaatgagtctttcccacttagtccactgaaactcacatgctaatatcttctgtaaacaccttcagagacacaaaaaataatactttaactgtcctccaggtgtttttcttttcagacagggtcttgatctgtcacccaggctggagtgcagtggtgtaatcattgcttactacagccttgactccctgtgctcaagcaattctcccacttcagcctcctgagtacctgagataacaggtactggccatgatgctcagctcatcctttttcttttatgttttgtagagacagaatcttatcttgctgttcttgagctcctaggctcaagcaactgctcctcaggctcccaaatgctgaggttacaggcatgaaccaccatgtatgcctggcagtctccaggtattccttaatttacttaagttgacaactaaaattaattattataagtccaccactcatcaccttgacacttatacatatgcccttatatcatacctaatttccaaatgacgacaaaaacaaggtaatagttttaacaaatataaagcatctattccaagaacaacgaaaagtgcaacagtatcttttccagaagatgaggtaaagctcttggaccatgttaaatttttcctgattaaagactatgatataaaattaacaatatttaaatactgacataaacataataaacattgtattacataacaaagaataataaaagagcaaaaacaacaacatttgcttaatatatgtctatagaaacatgaacatagtcttaactatataggaagaccatccacatggcagttatagtcctcatttctatcactggtcatttggttgtagcttgtatttgtaacagctttcttctgtccactccatattacatttaacaagcacctaagctggttatggttctttactcagagttgtgacccaaattttattcctaatgtttcttggctgtttttagtttttcctggattgggttcttgtaatttcccattgaccttaattacagttcattctaatactatgtatttcagacatacttttcattattccattgtggattagtattctaacttttcccttggtattccagatttatcaccccaggtaacactataactcccttctaagtctgttgactgagaggcatgagaaacacaaagtggcacagtggcattcttaactttcagttcaatttaataacttttaaaatcttttgttggaagcagtacttcctctggaactgagacctctaggccacctctaggcccagtcatgggagcagagccaaaaatatttctagaaggtcatgaggggaaataatgagtgatataactcccattttcacctcttcatttttggactcataaatcctgactatgggaaaatggtaccataggttggacgctgatgcagagcatatatcaccttctgaagaacctggcttcattgttaagaagtattgtcacctacttggtgccataaccaacatttcaaaaggtcatttatcattccactaagccagttgcttcaggataatggaaagcatggtaagtctactgaattctataaagatgagcacattactacactttggctgtgaagtgagtttcttggtctgagcaatgctgagtggaataccatgagaatgcataagggattccgtgagtccatagatggtagttttggcagaagaattccctgaaggtaaaacaaatttatatccatggcaagagcctactccaatgagtataaactgttgccccttatattatgaaagttattcaatgtaataaacctactaccagctacctggcgaatcaccctagaaatggtgtcatatcaaggactcagtgttgttatgtgctgctgtcagatttaacactcagaactggctgtagccagactggcctttgggattcaaagttgatgctgcttatcccatgcattgcttctatttctgctactatgttcactttgttcataagcccactgggtgatgaagagggtggcagggaaataagaataactgatacccacagaacaagtcattctgtccatgtcattatcaaaatcctgctctgatgtggtcatcccttggtgggcattcacatggaacatacatatctttatgtaacttacccagtgagaggggtttatccacaaaattctttccaattttttttgtcatgaattgtgtaatcatgttccctacatgtcgctgaccatctagccaattcatgggccacagcagtgttgcaggattggggatcataagatctcaaactcctggtctcaagcaaaccctgcctcagcctcttaagtagctgagactataggcgcacaccacaacgcccagctaattttgttgtatttttggtagagatggaattttgctgtgttttccatgatggtctcaaactccttgcctcaagcaactctcccagcttggcctgcaaagtgctggaattacaggcataaaccatcacactcagcacctataatttgatattttaaacaatactatctagtgaaacctataacaaagtcatgtagggaaagaaagctcactaacacagtgtaaaattgtatggatatgatgcatgcacatgtgtgcatacatgcttgtgtgtgtgcgtgggtgtgtgttttccgagaaatggtactttattgctacaaggctaggatagcattcatgttcatctggtgatgtcaaatattgaaattccaggattcacataacaagattcctaactcattcacaacacggtgaacactgtgaaacacaattgagaaatgggcactttggaagaaacaactggcctagggacaagagacagtgtgcaagccatctgctccatgaaatgctttgttcagagcatgcatttcatgcacttcattccatggtgacagatattgctactctgaggtcgtgagacattgaacctaggatttgctgtgaaactctatagactgaacatctgtctgcagtatctcctgcctctacccataacctgtgccacacaccagtggcgcactcttctctctggataaatgaaagttctggatgatccgatgtgcagagaattaggctgtttttcccaggggctctagttgaatttttttgggactgtctgggaggatgccctccacgttgtccaaggggaatcacgagaaaaccggtgaccccatgtgcctccattccctcccccttcctcccctacccctccatcagggatcgcatttattccagaatgatacttgctttcattgtcattgggagtcacctagcagcgaccgttattgaaaatttaagcagcatagaacagaaaaagctctagtcacctgtgcacagcttactgcaatggtgaacttctgggcttaagcagtcctcttgtctcagcttcctgagtagctgagactataggcctgtgccacaatgatcagcaattttttcaagtagtgataaactctctctcttccaggttgctctggaactcctggcctctagccatcttcccaccttggtctccagaagtgctagaattacaggcatgagacactatgcccagtcctataatttgatattttcaacaatactatctaatgaaactcattacaaacacatttggcaaaaggaagctcactatcatgatataaacttgtagacatatggtgcgctcccacgagcgtatgtgcctgcatgtgtgtctgttttctgagaaatggtactcttttccccaggggctgtggttgaagagttgtggggactgtctgggagggtgccctgggctcagaaatgtaatccaagagagatcagaagaccggcgaccccatatgcctccatccccttccccttccacgcccacccctcaacaagggatcccactcattccaggctgacccttcatttggttgtcatctggtgtcacctagaggtcactgttattgaaaacataggcatcccatcaaaactcctggctgcctgcacacagccagggaaaactgtggtttcccttgggccccacgctgacctcggtggcactcccgccctccctccacccactgccttgttgcctaaggaacctccaccctggctaggccccattgttcttttatcatttgtgtttctttttccttttttttttttttttaacaagcatagactcttcttccttggttttaaaaatggtgtgaaaggaaaataaatcttggggcttccaaatcactagctaaagggaaaagtcaagctgggaactgctttgggccaacctgcctctcattctgtacaaagtcacccctctgggcgcattggctcaaacctgtaatcctagcactttgggaggctgagggggtgtggagcacctgaggtctggagttcaagatcagcctggctaacatggtgaaactccatttctactaaaaatacaaaaattagccaggcatggtggtgcattcctgtaattccagctacccaggaagctgaggcaggagaatttctggaacccaggaggtggaggctgcagtgtgcagagatcgcatcactgcactccagcctgggcgacagagcaagactccatctcaaaaaaaaaaaagtctcccctctgctcacagagatacatgcatatctgattacctcttttgtaaaggctaacagaaactcaaaagaatgcaaccatttgtctcctatttcctatgacctcaatgccccctccccactttgagtcttcccacctatgcttcaagttttcccgcctttgggtcgagttttcccaccattccagattgaaccaatgttcatcttgcatatgttgattgatgtctcatgtctccctagaatgtataaaaccaaactgtgctgtgaccaccttagccacatgtcgttagagtaccttgaggctgtgtcacgggtgtgcatcctcaaccttggccaaataaacatttttttttttctgagatagtttcactcttgttgcccagactagagtacaatggtgccatcttggctcactgcaacctccccctcccaggttcaagcgattctgctgcctcagcctcctgagtagctgggataacaggcacccaccactacgcccagctatatttttgtatttttagtagagatgggatttcaccatgcctatatttttgtatttttagtagagatgggatttcaccatgctggccaggctggtcttgaactcctgacctcaggcaatccgcccaccttggtgtcacaaagtgctgggacgacaggtgtgagtcaccgcgcctagcttaaattgcgatttttaaaaataaatgagtttccaggaaaaaaaaatgaaaaaaacccacagtgaaacatatgcctctcgacttttgaggcagcaacgacactataaaattatatgtcgttccttaactcagctcatttcttgactggggaccataggcatttgggccacttcctcatggaacttacttgtgcttcagggtctgttcagacctgatcaggtccacacagcttctgtgttatgctgaagtgctgttgtgcacacccatttacagccagtttgtgatgagcagctcggttcacatggtaacttcatggccccacggttgggcattttgtttctactagcagccagagaggttagctgagacagaatcttctcttttgccgatggcagcatgggaatgaaggatgtgataggcatatttggaatttgtataaatgttgacttgtttacctttgggaagggttagggctctggtgagagctataagttctgctttttgggaggaggttcctggaggtaagggcctggctttaattacttggtcaagagaaacaactgcatatccagcaattttgggggagccagtgggcctggaagaggagccatctatgaacagctggtcactggggttggtgagagtcttggaggaaatgtttgggaagtgtggctgcaggtggtcttggatgtcagtgcaagaataagtaggaagggaagaggatacaagaagtaaggatgctgggttgaggggagcacttttggcaaggcagaatttgggatttttgataaagaggccatggagtaattgaatctgggaaggaggaagagagcttaatgcttgggaggagaggagatcttgtagactatgaggactgtagaccgtggtattttggctgatgttagtttcttgctttctagagctaaaactgtggctgctgccagtgctctaagacaggttggccaccctttgactgagttgctgagttgtttagagaggtaggctacaggagcaaaggaagagggattttgtttttgttgtcctgagacaccaagggctattccttggtttttggcagtatagagagtgaaaggttgggatatactaggtaaggacagagctggtgcagtgataagattggtttagagtttgtggaagttggggagtatgttatgtgaggagtttaggtgtttgttgaggggtctttggctgctttacaaagggggcaagctaggagggcaaagttgggaatccatatttttagaaagcctgttatccctaggaaagaaaggattttgcttttttaggaaggtagagataggctgactattaaggctgctgatgccagggtcatggcttgggacctgggggagagttgaagtcctaagcaggtcaccataggggtggaaagcagtgctttggagggggagaccctatggcctttattagtaaggaaattgagaagggtggcagcatgagtttgggagatttttaaggaggggctacagaggaggaggtcatctacatattgaagaaggcagctggaggaaagatttaaggaggtgaagtcttgggctagggcttgcccaaagaaatgagggctatccctgaagacttgagggaggacagtccatgtgagttgttgtgactggagagtgttggggtcagtctgggtgaaagcaaagaggttttgggaatcagggtgtaggggaatggtgaagaaggcatctttcaggtcaattgttgtatagtgggtggtgttggaggggacaagagagaaaagtgtatagaagttagggactacaggatgaatagggaggacagcctgattgatagctcggtggtcctggatgagtggtatgagccatcagatgttttaatagggaggatgggggtgttatacggagagtgtgttggtctaagaagactgcatgagcagagcttgtttatgatgggttgtaagcccttttggtatgttagggaaatggggaattggggaacattgggaaatttagagggttgttttaactggattttgatggggtcctagtgagcagctatggaaggggtggtggtgtccacactactggattaatgagggaggcggctagcgggtgctggggaggagggatcagaggctggactagcagagaggagcaggagagactctggttgagggggacagaaaaagttgatagaagccttgaatttggctaaaatgtctcggcctaggatgggggtggggcaatgaggcatgataaggaaggagtgtgaaaaaacagtattaaatagggaacaagtaagggattcagtagtgcatggacatgagaagagtacatcaacccccacaacagagacctgggaagggtaaatgggtcctaaaaatacaagtaaagccgattaggtggctccactgttgattaaaaaagagatcggtttacctgctattagcagagttaccctgggctccaatgcagtgacggcagatggggccgggggccctgggctctgtcagtctccagcagccaggccaaggaggtgtgggagtgtgagtgactcttcactctttgatttgccagggctttgaggaaccggcctgttagtctacttgttaagaggacaatcagacttccattgactggtttgttggcaggctgggcaaggagtttttggtattcgtgggttagggcatgttcaggcctaatggccttctttgccacacttaaaacagggcccaggagggtcactgctattgggtcttttgagcctctgggcagcctgggtagatagctgctgctaggagctggtatttagcctgatcttgttgggctttatttaatttattttgcccatctctgttgttgaaaaccttgaaggccaggataagaaggtcttgtagagggttttgatggccatcttctacctttttgagcttgcgctgtatgtcaggagcagactgagagatgaaatgggtattaagaacaatagttccttcctgggaggtggggtcaacactggtgtatttttggagggcctctgtaaagcgggaaagaaatttggcaagattttcattggccctttgggagatttttttttttgagttttttaaagtttacggccttgtgggcagcttcgttaaggcctgcaataaggaagtgatcatgtggttatgagatgccagccgggctctgtgggttggtactcccaggaggatttttcccggggaaatgcagcagcctttatgggcttaggagggtcttgccaatgaagatcgtcagcatgtgcctgagctgcaagctgcactcttttctttgtttttctgggaggaaagtagaagaaaggataatatagagatcatgccaagtgggtttataagattgagtgaggtatttgaactttttgatgtaagtgtcaggattggaggaaaaggacctgagaccgttcttaatttgggaaaggttggagagggagaagggaatgtggatgtgaacgaatcctttagcctcagccacctctcggaggggaagtaagggggccgactgttgggcatgctgagtccgagagcaggtatgaagtggagatggggagcaatcagaatcagaagttgggtggttaggagagaggaggggaaagaggtaaggcaggagcgggagcatatggtggaggattgtgatgatttgggggaggattatggtgttgtcagagagaaggaaagttggcagggtcaaagaaggaggaattgtcactaggagtggtggaggggggtgtttgaggatgggtcgggtttggagcaggcgaggaggatttggaaagtagagcaggactgacagagggagggacggctacagagggcaaaaaaaagcctgaacataagggatctctgaccactttccattgcgatggcagaagttgtctaggtccctgagaatgttgaaattgaaagtgccattttcaggccattgggagccattgtctagtttatattttggccagggagtgttacaataaaagatgaggtttttttggccaaattttggaatggaggataagggcattaatgttacagaggagatacccaaggggcgggggggggatgtctttgagggagtggattgggaggctcccttagtgaaatgagaaagggaggggtagagacaggagacttggctagaatggtgggagaaggcatcccttgtcccacggttcaagtcggagaagtgcgataatcctccgttcaggcatccccgaaagggagataccaagggcctagaggccgggaggaggaaacccttggcccagtgctaggtctttcaggaaggaaagagtagacaagggttccagaccgaaggcaaaagtctcctttactcacccctgaggtggtcctggtgtcggatgtgttcaccaagcgatggaaaggctgtatgagatccttgggtctctagcaggttctggaaggggtagttcggccgggggaagaatggagggaaggagaaagggagaaagggaggccaaactctaccaccttcctgagtttcagcaccagaaatgtaaggtcagctgagagaaaggatgaggagacccaaagtcagacaagcaagctttattgagctgcttggctgctccatcacagttagaggaggcagccccacttacagactatagcagggttttacagggccagaaccaggtcagggtcggggagctgagtcggggcaggagaactgggtcccagtagaggagctgagttggggatgcaggtgtctcaactgcatcctggagatgttttttgccagctttgttatgcgaggttaagagatatgttaaccgcatcctataactgtctggacaaacagatactggagggctcagtgaaggcaggggtttgtcttttgccctggggtagctgtgtggagagcacaagggagtgtattgtgaggcctgtgggaggggaagggtctggtcggggtgaccctaacagggagttttttcagacccccaattaaacttatttaatcttaaatggtcctgttaagaattccctcatcatcttgtcatgctccaaggcaggcccaggaaagtcctagtgaaaactcttggtggacttttgcgacattccaccctttgcaagagtgcactggttctctcagcttttaatatttaacttagccacttggtcagtactgaaacggttgttgcagaggcccgccttagttagtgagacctggcctgccacacacacaatggggcaatctcggcttgctgcaacttctgcatcctgggctcaagtgattctcctgactgggcccctccagtagctggaactacaggtgcccgccactgcccccagctggagctacactaactaatgtataggaatagattgaaatagagatttctccacaacagtgctggatgaacacctcaaggggatcacacaacctcttccgggacgtggtgaccattgtttctgtccgtgttcaactgagttcaaatttgatatttaagttttcctccacattcggcctcaatttgatactcaattgtaggaaaatacccttacagatacatggggaaggcacagttgatatagattacagatacagggtaagcacaggagaattaaaatcacaattaataaaaaccacacccactatggccaatgccaatgccagttggatagccagtccttgatggggtcctactggttagattccaactgttttacctgtttttgcatgtcttgggcaagaagagtaatactgtgagaattgtcagggatatacacacaacattcagtatgcagtaaggagcaaaactctccttgggctgcagtaagcatatctaatgtcattcgattttgcaacacaacagtatgcagctcagcaaattcatcgataacaacataaatccagtgctactctcaagagctttttctacatggaaacttaatattttaatttgttgctgaagcaggattgtaccagcggcaggggagaatactgtgatagggtaccaccaccagggagtctggcgcattcacaaccagcaatgtttgtaagcatctcaattactggggaggggaatatcatcccagatggtgaatggaattaatggccacccccaatgcatcttcctgcccagtgtgggggcaggtatcaccatctgtaggatctgcatacccagagggccctccagggaacagcaatggttttactataattatagtgtattaaggtgttattaaagtaggaaagagattgtgtttcattaggagcagtgtcactgatttggagtatgtgttgacaattgtctggaaggagaaatgccagagtgccattggaggagccattcaaggcctccaaacaaagcggaggctatatggagtccagccaccaacatggcaggctctaggtatatgccattccaggtatattgggcagaataccaaggcttctgacataaggcaagggtggagttaatcttttgtccaacttgagcaaagacagaatgcttggtttggccaaaaaaagtctgggttcgattgcaagtgttgttgttgtggcctcattggtgccgacatagcattcagaaacatcggcagggatgattctccaaggtagtccatttcctgtggcctctggcaattagacacatagccagcattgactgcggttggcttctgttgcagtggtggctacccagttgatgaactcattcttggctcagacatgataacccaggtactgattactagcaaacaggttatcctctttaataagaaaaatggaggggcacattatattgtttttcctctttaggaaattgtactatgccttcattttctgctcccatagctacaaggttaccagacatagggacgggatctgatggacactgtacccatattttggctccaggatttaagctacttgtaccagtggatccgaatcccccagttccataagtagcctcttttggggcagagatttcctcaggggttaattgttgacaaggtgtcactaacaattgagaaacccgcatctgcagttttatagcaaaagaatctggagtggtattgtataaaatgaccttcaactctccccagtaatcactgtcagttatgcccccatgtaccgtaagaccccacattgcaagacctgatcaggatgtaacccatctgcagtgtttgcgaggtattataactcctaggcctgaggccaccatgtatgtactttgggcaggaattatcccagacttgaaactatgtaagtccaagccagtagcttctattgtactctttcatgggagtatagcctccgggtggattttctagaattttagcgagagaggttggactacactggcacacttagcaatttgtaggtgtggggtaagcatttggctcactggggtttcagatgttgttaatcgccaattgtttaaattttgtaatgtgtcaaacaggtgatccttccatttttctaacttaccttgccctaacactttcaactgtttgttcaataactcattcattctttcagttaaaccagctgcttgcaggtggtaaggaatatgggaaaatccattcaatgccatcttgggctgcaaaggtttgtacagcttcacctttgaaatgggagccattgtctgtttgaatttgtatgggcacaccatcatatagaattaggatatttcatgttttaatagtgttaatttggttagcattagcataagcacaggctactaggagccctaagtaggtgtctacagcagtacatatatattggcaccctttagaaagtggcaagggacaaatatagtccatttgacaaatttgtcctggcatttttccccggtgaatgtgccccatagccctttgaggaattggcttggtttttaactgttggcatgtagtgcattgggataaaattgtctgaactgcatcctggggtaacatccttctttacactccccaagccatggttccctgtacgcctaggtgtccgcactggtgatgcacccattgtgtgattgcagcccaatctacttcttccaggtctgagtcggcagtaatagtagaaattttagcttgttggtctgcctgctgattagtctgtcaagagaaagcaaaaaggcatgaacatcaacatggaaaacagtgataatggtagtgtgcaccagaatccagatatctacccagtattgttttcccctggggtttagggggtggagtggggctagaaagtcagtcccctacctttgctagctcagcaacgacatctgccgccccccggaccccttgcttaccctaacagatcccccatctccaccgccttggaggttgacctcttactttgctttctgtttttcttcctttcttgggcttgagcagggggtgcaggggcgagggtgtgtgtggggaaggggtgtggggtgaggagggaggggagtgtcctaagaatcaatttagtgtcatgcctctttcatcaccaccaccactgaagatgaaaccaacaataaactaaataactgcattctcatctatagccttccacctgcttgggcggtccgaactggagttgtgatttttttcccccttcgctcctgaggcctccctctgtaggaaagtttcaccctggctgggtctcaaccagtggacttcgtggtttgggtgaatgagggcagcacccctgcttggtgtccagccactctggttcccgcctcctcctcctacaccatggagggctcatcctcgggctgggatggggttctgggagcatgttggggacagctgaggcagtcctttaccaggggtggccgcgtgggcccaggggcggggtggggggggctttctgagttccagatctcctctgcactgcggcagggtgtgggcacactgggacttgggccactcttgtgcacccttcctccactttctgttgcccaggtctaccagggtgggggaagggagcgatggggaggtcccgtatgacttctggtcccaagtgtcccactaccctccaccctcagcatccggcctgctggccgctcctctgtcaggtctccgggtcaactagatgtcggccacgaacgccagacttagcctccggctcgccatgtttgaggtcgaccagcaggccctctcaccggagtgagctgtaaggagggatgctcagtgaaccaatcaagacgtgggccacggaggtcagcagggctctgggcaattcatggtcctgacctggcaagcaccactctgggacctgagcgttgcaaacccatctacacccgtccaacctgtgttggccggcgctcctcgctcgctcaggcctccgggttgacaagagttcagccgtgagcgcctggtttagccgccagcttacagtgtcggaggtcaaacagcaagccctcccccggagtaagcagtgagaagggaagcccggcggaccgagtgcaacacgggctgcagcggggagctgggttcgggacgggtcagagtcctgaccatgctggtatggctccaggccctgagcatcccacacccagccaccatcgatggactggccattcctcagtcactgaggcctccgggtcaaccagatgccagccacgcctgacttagccgctggcttgctgtgtccgaggtcgaccagcaggtcttctcatcagagcactggggagggaagcccactggaccaagtgagatgccctttgaggggtgagccaggctcaggatgggtcagggtcttgaaagtcctggccccgagtgtcccacacccggccaccttcacccaccagctgctcctcactccctcgggcctctgggtcatcacgatgttgactgccagcaccgtacatggccactggctcaccttgtctgaggtcgaccagcaggccctttcacaggagctgcagtggggagggaagcttgctctggaccctgtgtggaacagctgtcagccgcgggtgccatacttagccactggcccgtgtctgaggtcattttaagggcgagactcctggtctaactcaggtattgtaaggggagagacacctggccaacctcaggcattctaatgggaaagatgcctggaccaccacagccattataaggggagggtttcctagatgaactcaggcattctgaagtgagagtctcctggctgacctcaggcattgagtggtgagatacctggactacctcagaaattctaaggggagagtctcctggttgacgtcaggcattctaacagtagagactactggctgacctcaggcattctgtggggagcgactcctggccaacctcaagcattctaagaggatagtcttctggccgacctcaagcattccaatgggagagacaccaggccagcctcaggtattctaaaaggagtgattctgggtcaacctcaggcattctgagaagagggtctactggccaatctcaggcattctatgtggagagaaacatggctgaccttaggaattataaggggagagaaatctggccaacattaagaattctagtggaagaaacgcctgaccaatcttaggcattttaattggagagacatctgtacgaacttattcattctaaaaagagagacccctggctgaccacattctttctcatgaaacacctggccgacctcagacattctatggggagagtctcatggccgaccacatgcattctaataaagtagacacgtggaccacttcaagaattccactggggacacactgttccaagatggatgaataggaagagctccggtctgcagctcccagcatgattgacacagaagacaagtgatctctgcatttccaactgaggtacctggttcatctcattggtactggttggacagtgggtacagcccacggagggcaagtcaaagcagcttggggcatcgcctcacccatgaaatgcaagggcctgggggatttccctttcctagccaagggaagccatgacagactataccgggaaaatcaggacactgccacctaaatactgtacttttccaacagtcttagcaaatgacacaccaggagattacatcctgtgcctggcgcaggaggtcccacacccaaggagccttgctcactgctagtgcagcagtcccagatcgaactgcaaggcagcaagcctggctgggggaggggcttccgacattgctgaggcttgagtaggtaaacaaagcagccgagaagctcgaactgggtggagcccaccacaggtcagtgaggcctgcctgcctctgtagactccatctctgggggcagggcatagctgaacaaaaggcagcagaaacatctgcagacttaaacatcactgtctgacagctccgaagagagcagtggttccccagcatggcgtctgagctctgagaactgacagactgcctcctcaagtgggtccctgacccccatgtagcctaacttggagacaccacccagtaggggccaagtgatacctcatacagctgggtgcccctctggaatgaagcttccagagcaaggatcaggtagcaatatttgctgttctgcagcctccactggtgatacccaggcaaacaggttctggagtggacctccagcaaactccaacaaacctgcagctgagggacatgactgctagaaggaaaactaacaaagagaaaggaacagcatcaacatcaacaaaaacgacatctacaccaaaaccccatctgttggtcaccatcatcaaagaccaaaggtagataaaaccacaaagatggggagaaaccagaacagacaagctgaaaattctaaaaaccagagtaccccttctcctccaaaggattgcagctcctcgccagcaatggaacaaagctggacagagaataactttgacgagttgacagaagtaggcttcagaatgtcagtaataacaaacttctctgagctaaaggaggatgtttgaacctattgcaaggaagctacaaacctagaaaaaagattagatgaatggctaactagattaaacagtgtacagaagaccttagatgacctgatggcactgaaaaccatggcacaagaactatgtgatgcatgcacaagcttcagtagccgatttgaacaagtggaagaaacggtatcagtgattgaagatcaaactaatgaaatgaagtgagaagtttagagaaaaaaagagtaaaaagaaatgaacaaagcctccaagaaatatggattatgtgaaaagaccaaatctatgtttgattggtgtacctgaaagtgacagggagaaggaaccaagctggaaaacattcttcaggatatcatccaggagaacttccccaacctagcaagacaggccaacattcaaattcaggaaacacagaaaatgccacaaagatactccttgagaagagtaactccaagacacataattgccagattcaccaaagttgaaatgaaggaaaaaatgttaagggcagccagagagaaatgtcgagttacccacaaagggaagcccatcagactaacagctgatctctcagcagaaactgtacaagccagaagagagtgggggccaatattcaacattcttaaagaaaataatttttaacccagaatttcatatccagccaaactaagcttcataagtgaaggagaaataaaatcctttacagacaaacaaatactgagagattttttcaccaccaggcctgccttacaagagctcctgaaggaagcactaaacatggaaagaatcaactggtaccagccactgcaaaaacatgccaaattgtaaataccatctatgctaggaagaaactgcatcaactaatggacaaaatagccagctaacatcataatgacaggatcaaattcacatgtaacaatattaacctgaaatgtaaatggactaaatgcctcaattaaaagacacagacaggcaaattggataaacagtcaagacccaccagtgttctgtattcagaagacccatctcacaggcagagacacacataggctcaaaataaacacatggaggaatatctaccaaggaaatggaaagcaaaaaaaaagcaagtgttgcaatcctagtctctgataaaacagactttaaaccaacaaagatcaaaagagacaaggccattacataatggtaaagggatcaattcaacaagaagagctaactatatatgcacccaatacgggatcacccagatttataaagcaagtccttagagccctacaaagagacttagactcccacacaataataatgggagagtttaacaccccactgtcaatattagacacatcaaggagacagaaggttaacaaggatatccaggacttgaactcaactctgcaccaagcagacctaatagaaatctacagaactctccaccccaaatcaacagaatatacatcattctcagcactacatcacacttattccaaaactgaccacataattggaagtaaagcactcctcaggaaatgtaaaataacagaaatcacaacaaactctcagaccacagtgcaatcaaattagaactcaggatgaagaaactcactcaaaactgcacaactacatggaaactgaacaacctgctcatggatgactactgggtacataacgaaatgaaggcagaaataaagatgttctttgaaaccaataagaacaaagacacaacataccagaatctctgggacacatttaaggcagtgtgtagagggaaatttatagcactaaatgcccagaagagaaagcaggaaagatctaaaattgacaccctaacatcacaatgaaaataaccagagaggccagagcaaacaaattcaaaagctagcagaaggcaagaaacaattaagatcagagtagaactgaaggagatagagacataaaaacccttcaaaaaatcagtgaatccagaagctgttttttgaaaagatcaacaaaattgatagaccactagcaagacaaataaagaagaaaagagagaagaatcaaatagacacaataaaaaatgataaaggggatatcaccaccgatcccacagaaatacaaactaccatcagagaacactataaacacctctactcaaataaactagaaaatctagaagaaatggataaattcctggaaaaatacaccctcccaaggctaaaccaggaagaagttgaatcgctgaatagactaataacaggctctgaaattgaggcaacaattaataacctaccaaccaaaaaaattccaggaccagatggattcacagctgaattctaccagaggtacaaagaggaggtggtaccatcacttctgaaactattccaatcaatagaaaaagagggaatcctctctaactcattttatgagaccagcatcatcctgataacaaagccttgcagagacacaacaaacaaagagaattttagaccaatatccctgatgaacattgatgcaaaaatccccaataaaatactggcaaaccaaatccagcagcacatcaaaaagcttatccaccaagatgaagttgatttcatccctggggtgcaaggctatttcaacatatgcaaatcaataaacgtaatccgtcacataaacagaaccgaagacaaaaaccacatgattatctcaatatgtgcaaaaaaggttttgacaaaagtcaacagcccttcatgctaaaaactcccaataaactaggtattgatggaacatatctgaaaataagagctatttatgacaaacccacagccaatatcatactgaatgggcaaaaactggaagcattccctttgaaaactgtcacaagaaaaggatgccctctctcaccactcctatttaacatagtgttggaagttctggccagggcaatcaggcaagataaagaaataaagtgtattccatcaggaaaagaggaagccaattgtccctgtttgcagatgacatgattgtatatttagaaaaccccatcgtctcagccgaaaatcttaagctgataagcaacttcagcaaagtctcaggatacaaaatcaatgtacaaaaatcacaagcattcttacacaccaataacagacaaacagagaaacaaatcatgaatgaactcccattcacaattgctacaaagagaataaaatacctaggagtccaacttacaaaggatgtgaaggacctcttcaaggagaactacaaaccactgcttaataaaacgaaagaggacacaaacaaaaggaaggatattccatgctcatggataggaataatcaatattgtgaaaatggccatactacccaaggtaatttatagattcaatgcctccccagtcaagctaccaatgactttcttcacagaattggaaaaaactactttaaagttcatatggaaccaaaaaaagagcctgcattaccaagtcaatcctaagccaaaagaacaaagctggaggcatcacgctacctgacttcaaactatactaaaaggctacagtaaccaaaacagcatggttctcataacaaaacagagatatacactaatggaacagaacagaagcctcagaaataacaccacacatctacaatcatctgatctttaaaaacctgacagaaacaagacatggggaaaagatttcctatttaataaatggtgctgggaaaactggctagccatatgtagaaagctgaaactggatgccttatttacactttatacaaaaattgattctacatggattaaagacttaaatgttagacctaaaaccataaaaatccctagaagaaaacctaggcaatatcattcaggacataggcatgggcaagtacttcatgactaaaacaccaaaagcaatggcaacaaaagccaaaatagacacatggcatctaattaaactaaagagcttttgcacagcaaacgaaactaccatgagagtgaacaggcaacctacagaatgggagaaaatttttgcaatctactcatctgataaagggctaatatccagaatatacaaggaactcaaacaaatttacaagaaaaaccaaacaaccccatcaaaaagtgggcaaaggatatgaacagatacttttcaaaagaagacgtttatgcaaccaacagacacatgagaaaatactcatcatcactggccatcagagaaatgcaactcaaaaccacaatgagataccatctcacaccagttagaatggcaatcattaaaaagtcaggaaacaacaggtgctggagaggatttggagaaataggaacacttttacattgttagtgggactgtaaactagttcaatcatgtggaagacagtgtggtgattcctcaagtatttagaactagaaatacaatttgacccagccatcccattactgggtatatacctgaaggattataaatcatgctactataaagacacatgtatatgtatgtttattgcagcactattcacaacagcaaagacttggaaccaaaccaaatgtccatcaatgatagactagattaagcaaatgaggcacatatacaccacggaatactgtgcagccataaaaaaatgatgagttcatgtcctttgtagggacatggatgaagccagaaaccatcattctgagcaaactaccacaaggacaggaaaccaaacaccgcatattttcactcataggtgggaatttaacaatgagaacacttggacacaaggcagggaacatcacacactgggtcctgtcgtggagtgggagttggaggagggatagcattaggaggaatacctaatgtaaatggtgagttaatgggtgcaagaaacgaacacggcacaattatacaagcacatgtatacatatgtaacaaatctgcacgttgtgcaaatgtactctagaacttaaagtataatttaaaaaaagagggagagaaaaaaagaaagttactctgaaaaaaaaagaattccattgggagatcatcatggctgaccacagacattctaatgggagagatacctggccaactgcaggcattctaacaggggagacacctaactgaactcaggcattctaaagggagaaaaacctggccagccacattcattctaacaggagtgacacctggccgacctcaggcattctgggagagagacatttggccgacctcatttattctaaacagaaagacgtgtggccgactttaggaattttaacaaaagagacacctggcctacctcaggcattataacacaagagacactcctggctgacctcaggcattctaatgagagtgacacctggctgacctcattcattttacctggagagactcctggccaaatttgggcattctaatgggaaagacaccttgctgatctctggcattctaatgggagagacagctggcggcttcattctaacaggagagacacctggccaaccacaaacattctaaggagagagacacctggccaacctcaggcattttaacaagagagacaactggtcgacctcaggcattccaagaggaggatctcttggctgtactcaggcattctgattggagagactcctggccgatctcaggaattctaatagaagagacaccaggctgacctcattcattctaatgggattaactcctgcccaacctcaggcattctaacagagaaacctgggcaaccgcaggcattctaaggggagagcctcctggctaacctcaggcattctatgggaagagacccctggcagaactcaagcattctaatggaagagactccttgtcaacctcaggcattctaaaaggagagtctcctggttgtcctcaggcattctaactggagagacgactggccgacctcaggaagtcttgggagagacttcctgctgacttcagacattctaatgggagagaatcctggctgacctcaggcatcctaagggaagagacacctggccgacctcaggcattgtaatgggagagacacctggctaacctcaggcattctaagggaagggactcctggctgacctcaagaattctgagtggagaaacatctgccctacatctggcattctaaagggagggactcctggccgacctcaggcattctaacgatagactcctggctgacctgagacattctgagaggagagactcctggccgagctcaggcattctaaggggagagactcctgaccgacctcaggtattctgagtggagagacacatgtcatatatcaggcattctaaggggagaatctcctggtaaatctcaggcattctaatggtagagactcctggctaacctcagacattctgaagtgagagactcctggccgacctcagacattctaatgggagagacacctagctgacctcgggcattctaaggggagagacatctggccaacctgattcattctaatggtagagacacctggccgaacacaggcattctaaggggagagccacctggccgaccacaggcattttaaggagaaagatacctggccgacctcaggcattctaacgagtgtgtctcctggccgacctcaggcattctgacgagggacaactggccaacctcagggattccaacagggcagacacaacgttgacgtcattcatcctaactggtgaaactcctgtcaaacctcaggcattctaatgaaagagacacctggccaacctcagacattctaacacaagagacacttggccaaccttaggcattctaaggggagagtctcctggccaatcccaggcacttgagagaaacagctggctgacctcaggcattctaatgggagtgagtcctagctgacctcaggcattctaagaagacatgctcctggccgaattcaggcattgaaatgggagagattcctggctgtcctccggtatgctaaggggagaaagacctggctgacctcaggcattctaaggggagaaacacccggctgacatcaggcattctaatgggagagacatctggctgaactcaaggattctaatgggagagacagctggccaatctctgacattcaaacaggaggatctcctgtccgacctcacacattctgagttgagagatacctgaccaacctcaggtcttctaaagaaagagacacctggccgacctcaagcattctaatgggagagacacctggccaacctcattcattctactggaagagatacctggccaacctcaggcattctaagaggagagatacctggccgacctgttcatactaagaggagagattcctggcttaccacaaccattctcacaggagagtcctggccgatctcaggcattctaatgggagaaactcctggttgaattcaggctttctaatggggagacatcaagccaacttcattctttgtaatggcagatacacctggccgatctcaaacattctagtgaaagagacacctggctgacctcaggcattgtaaggggaggggtccctggccgacatcaggtattctgagtggaaagacacctgccctatctcaggcattctaaggggagtctcctggtcgaccacaggcattctaaccatagagagtctttgtcgacctcaggcattctgagaggagagtctcctggccaatctgattcattctgatgggacagacacctgtctgaccacagatattctaaggggagaaacactggccaaacacaggcattctaatgagaaagacacctggccaacctcaggcattcaaagggagagtctcctggtggacctcattcattttgatgggagagacaccaggctgacctcatttatcttaatggtaggcacctgtccgaccatcgtcattctaatgggagagactcctggccgacctcaggcattctaacatgagacacctggccgacctcaggcattctaaagggagtgtctcctaggcgatcacagccattctatgggtagagacacctggtctacctcagggattctaatgagagaaacaactggccaacctcaggttttctaacagagactcttggccaacttcgggcattcaaaagattgagactactggccaacctcaggcattctaatgggggagaaatgtggcagacctcaggcattctaacgtgagagtcttctggatgacctcaggcattctaaggggagagacacctggccaacctcaggcattataatggaaaggactcctggcctaactcagggattctaatgggagagacagccagatgatctccatcattctaaggggaggaactcctggctgacatcaggcattctgaggggagagtctcctgtccaaattcaggcattctgagtggatagacacctgaccaacatcaggcatctaaggatagggacacctggctgaactcaagcattctaaggggagagacacctggttgacctcattcattctattgaaagagatacctggccaacctcaggtattataaggggagagacgcatggctgacctcatccatactaagaggaaaggctcctggcttacctcaagtattctttttttatttttttttccttttttcatatatatatatatatatatatatatatatatatatatttttttttattatactttaagttctagggtacatgtgcacaacctgcaggtttgttacatatatatacatgtgccatgttggtatgctgcacccattaactcgtcatttacattaggtatatctcctaatgctatccctcccccctcctcccaccccataacaggccccggtgtgtgatgttccccttactgtgtccaagtgttctcattgttcaattcccacctatgagtgagaacatgcggtgtttggttttttgtccttgcaatagtttgctgagaattatggtttccagcttcatccatgtccctacaaaggacatgaagtcatcattttttatggctacatagtattccatggtgtatatgtgccacattttcttaatctagtctatcattgttggacatttgggttggttccaagtctttgctattgtgaatagtgctgcaataaacatacgtgtgcatgtgtctttatagcagcatgatttatattcctttgggtatatactcagtaatgggatggctgggtcaaatggtatttctagttctagatccctgaggaatcgccacactgtcttccacaatggttaaactagtttacagtcccaccagcagtgtaaaagtgttcctatttctctaaatcctctccagcacctgttacttcctgactttttaatgattgtcattctaactggtgcgagatgatatctcattgtggttttgatttgcatttctctgatggccagtgatgatgagcattttttcatgtgtctgttggctgcataaatgtcttcatttgagaagtgtctgttcgtatcctttgcccactttttgatggggttgtttgtttttttcttgtaaacttgtttgagttctttgtagattctggatattagacctttgtcagatgggtagattgcaaaaattttctcccattctgtaggttgcctgttcactctgatggtagtttcttttgctgtgcagaagctctttagtttaattagatcccatttgtcaattttggcttttgttgcctttgcttttggtgttttagacatgaagtccttgcccatgcctatgtcgtgaatggtattgcctaggttttcttctagggtttttatggtttcagttccaaaatttaagtctttaatccatcttgaattaatttttgtataaagtgtaaggaagggatccagtttcagctttctacatatggctagccagttttcccagcaccatttgttaaatagagaattgtttccccatttcttgtttttgtcaggtttgtcaaagctcagatagttgtaggtgtgtggtattatttctgaggcctctgttctgttccattggtctatatctctgttttggtaccagtaccatgctgttttggttaccgtagccttgtagtatagtttgaagtcaggtagcgtgatgcctccagctttgttcttttggcttaggattgacttggtaatgcaggctcttttttggttccatatgagctttaaagtagtttttttccaattctgtgaagaaagtcattggtagcttgatggggatggcattgaatctataaattaccttgggcagtatggccattttcaaaatattgattcttcctatccgtgagtatggaatgttcttccatttgtttgtgtcctctttcattttattaagcagtggtttgtagttctccttgaaaaggtccttcatatcccttgtaagttggattcctaggtattttattctctttgaagcaattgtgaatgggagttcactcatgatttggctctccgtttgtctgttattggtgtgtaggaaagcttgtgatttttgcacattgattttgtatcctgagactttgctgaagttgcttatcagcttaaggagattttcggctgagacgatggggttttctagatatacaatcatgtcatctgcaaacagggacaatttgacttcctcttttcctaattgaatacactttatttctttctcctgcctgattgccctggccagaacttccaacactatgttcaataggagtggtgagagagggcatccctgtcttgtgccagttttcaaagggaatgcttccagtttttgcccattcagtatgatattggctgtgggtttgtcataaatagctcttattattttgagatacatcccatcaatacctactttattgagagtttttagcatgaagggctgttgaattttgctgaaggcctttcctgcatctattgagataatcatgtggttttcatctttggttctgttatatactggattacgtttattgatttgcgtatgttgaaccagccttgcatcccagggatgaagcccacttgaacatggtggataagctttgtgatgtgctgctggattctgtttgccagtgttttattgaggatttttgcatcgatgttcatcagggatattggtctaaaattctcttttttggttgtgtctctgccaggctttggtatcaggatgatgctggcctcacagcatgagttaaggatgattccctctttttctattgattggaatagtttcagaaggaatggtaccagctcctccttgtacctctggtagaattcggctgtgaatccgtctggtcctggactttttttgattgataagctattaattatttcttcaattttggagcctgttattggtctattcagagattcaacttcttcctggtttagccttgggagggtgtatgtgtcgaagaatttatccatttcttctcgattttctagtttatttgcatagaggtgtttatagtattctctgatggtagtttgtattcctgtggtatcagtggtgatatcccctttatcattttttattgcatctatttgattcttctctcttttcttctttattagtcttgctagcggtctatcaattttgttgatctttaaaaaaaaaacagctcctggattcattgattttttgaaggggtttttgtgtctctatctccttcagttctgctctgatcttagttatttctcgccttctgctagcttttgaatgtgtttgctcttgcttctctagttcttttaattgtgatgttagggtgtcaattttagatctttcctgctttctcttgtgggcatttagtgctataaattaccctctacacactgctttaaatgtgtcccagagattctggcatgttgtgtctttgttctcgttggtttcaaagaacatctttatttctgccttcatttcgttatgtacccagtagtcattcaggagcaggttgttcagtttccatgtagctgagcggttttgagtgagtttcttaatcctgatttctagtttgattgcactgtggtcagagagacagtttgttataatttctattattttacttttgctgcggagtgttttacttccaactatgtggtcaattttggaataggtgtttacctcaagcattctaagggaaaagtctggccaacatcacatgttctaaggggagagacatctggcagacttcaggaactctaataggagagacacatgggtgacctcaggcattctaatgggaaagacacctggtccacctcaggcattctaaggggtaggactccaggccaacctcaggcattctgagtggagagacacctggctgacctcaggcattctaacagaagagacagctggccaacctcattcgttctaatgggagatatacctagacaaccacaggcattctaaagggagagacacctggctggccttatttattcattgtaatgggagagaaacctcgctgacctcattcattgtaatgggagacacaattgactaactgcaggcatatttaacaggagagacatctggccgacctcaggcatcctaaggggagaggcacctgacctacctcaatcatcctaacagaattgacacctgtctggcctcaggcattctaataggagagaaacctggccgacctcaggaattctaaggggaaagacacatggccaacctcaggcattctaacaggtgagacacctggcccaccaaaggcattgtaattatagagacacttggctgacctcaggctttccaaggggagggacacctgtatggccggatggcctcattcattctaatggggtgacaactggcctactttaggcattctaaggagagtctctgggctgacctcaggcattctatggagagaaacacctggccatcctcaggcgctctaactgaagagactcctggccaacttcaggcattctaaggggagagacacctggttgacctcagtcattctgacaatttgttgtcaatatttgtaaaaattacttcccacatagaattttagagtgctggcttttcttcaaaaaacagagaagatctgggatactctatgccagtgtgaagtaacaagaataaatgaataaatttaaaaattagaaaaaatcatttggctgcagctaagtaacatccttttattttagtctggccatgcattttccaattctctaggactcccttactcagtagtgctttatggccaactttttaaaaataaatttacctgctagtatcctgtatgcataggatttatgacactgtaatgaaataaccaacagtgcatccatacaacagtgcaccagttattcattaaactaggtaaaacatgttattataaacataatctatttatttgcatgtctccgtgttgttttgttttgagatagagtctcgctctgtcgcccaggctggagtgcaatgacacaatctcagctcactgcaacctccgcctcccaggttcaagtgattctcctgcctcagcctccagagtagctgggattacagccatgtgcaaacatgacaggctaattttttgtatttcagtagagacccagtttcaccgtgttagccagaatggtcttgatctcctgacctcatgatccacctgcctcagcctcccaaagtgctgagattacaggcgtgagccaccacacctggccatgtgtttttgagaaaaggtcttgctctgtcacccaggctggagtgcagtggcacaaacatggctcactgcattttcaacctccctggctcaagcaatccttccacctcagcctcctgagtagctgagaataaaggcatgagatatcatgcctggattatgttatttatttatttattttgtagacatggggtctcactatgttccataggttgatcttaaactcctgggctcaggcaatcctcctgccttgacctctcaaagtgctgagattataggcatgacccaccatcccaggcctgtgttattgttgttattttatgttgcataaaaaatcacaaagtgagtggtttgaaaaattagaagtctattatctcacaggaggccaggaggccaggcacagattaactgagccatctgctgttacatttgggatgatggagaataaaagccatctttttaaaaaaatcttatctgcaagggaaacatccctaatcactagaatgtcatattattaacacaagatttgtttctattttaattagaaaactatagagtatgcttagaccagtagcaaatggctcttccttgctgtggtttgggggacattggcaggtggtgagtattattctattcaggcctcttgcctaacttggttttagaaggcatgaggttctttatggttctatgtctgtgggtaaggctgcagctgctgattatgctaattcttgcttccttgcaaatagccaactccttattttgtgcattgccagctatcaacagagacattttaggaataattttcatgttaaaggcaggctttgttgtagtgtcctactgtgaactgtcccagcattagacccatcagaggtttgtgaagagagctctgatgttagaacagtgagcacagtactctgccaatttgcccattacctcttctgtctcccctagcaggaactactgtctggctttctcaagaggaacatgaattgctgctctaatggactgttcatggatttgagatcttattttagttagggaggttgagactttcatggcttcataattgatgcttgagaaaacattctttctaattggaaattctaacaatctccataaagcctgttttgctgtccctaaggctttgaatgcattcttgtttggtaatcagaatgaaaacaaacttttcaaagcaaataattgtgtttttttgttgttgtttgtttgttttttgagacggagttttgctcttcttgcccaggctggagtccaatggtgcgatatatgctcactgcaacctctgcctcctgggttcaagtgattctcctacctcagccccctgagtagctgggattacaggtatgcaccactatacccagctaattttgtgttttttagtagagacggggtttctccatgttggttaggctggtcttgaactcctgacctcaggtgacctgcccaccttggcctcccaaagtgctgggattacaggcatgagccactgtgcccagccaataatggtgttcttgacctttattttgggttatattctatttatatgttataatctaaatttaattttatttgattttgtggaagaagtagagaaaattagtttgctttttaattgatattactttaaatgaaaaaggaaacaagttagtaaatctaagagcatttaattttcacttttttttcttaccattgtctctgcttagccatctttttagttattagatgaattaggatactttttgcatgagaaatactttgacactcatgtatatcaatgaaagtgtgcctctgcttttgattttggtttactacttaaattactcttgaattatgctgacaagatccatctcaagtttctcaaagcataatgtgaggagagaaaaaattctacatgcttggggtttccttgaaggaaaccacaaaatccctgatgcctcaatgaacatgcagacctcccaggctgcctaagcatagaatgttaattctgaacacctaatttcttccagatctttccctccccgcttacgtggggcagatatcaacatatagtaatttatttaaagaagtatctgctcactgctatctttgggtcaatgcttgtgctaagctctgagattacagggataggttaactagattcctccttaaatgaattaagacttagagcaaaaaaatacaaataagtaataattgcccttaactttcttttgggtgtggtgaaaggcagctgggaaagatctttagtatcagtgagggcataggtaagccttcattgcacacagcatgttgagcaagggtcccaaatgggaataaatgggtgaagaaaatttcaggaaagaaaacagatcatagtttagagaacctgaatattagactaacctggattcaaatcctgccagcactgcacattagctgtgtaaccaaacaaagatctttaccattcaacatttgctggatacaaggttaatatacaaaatgtaatcactttcctatatatcagcaatagatacctgaaatttgaaattaaaacaccataacatttatattagcatcccccaaaataaaatacttggctaaaaatctaacaaagtatgtacaagatttatataaggagagccataaaactatgatttaaaaaatcaaataattgaagaaattgatagatactacatgtttatggatagaaagattcaatattgtcaagacattggttatttctaatttgacatatagacttaacacaattaaaataaaaatcccaacaaattatttcatggaaatcaacaaactgatgctaaagtttacatgaaaaggcaaaagacccaggataaccaacattagaaaaaatgaaaagccagaggactgacactacccatgttcaagacttactataaaactacagtaaccaaaagagtatggtattcataaaagaagataaaaagagattaatgcaacaggttatagagcacaggtatagacccacataaatataatcaaggagcaaaggtaatacaatgaggaaaagatggtcttttcagtaaatagcactcaaacaacaggatatacatatgaaaagaatctacaaacaggctttacactgcttaaaattaactcaaaatggatcataagactaaatgtaaaatgcaaaactgtaaaacttctgggaaatagcataggaaaagagatctacactaccttgggcatggtgatggcttgttagatacaacaccataggcatgacccatgaaagaaacaattgataagctggccttcattataatttaaatcttctgttctgccaaaggtactgtcagtagaaggataacacaagctatagactgggagaaactatttgcaaaagatatatctgatacagtacttctatctaatatatttaaaaaattaaaactcaacaataggtaaaaaagcttaattaaaaaacacaggcaaaagacctgaacagatactttatcaaaaatatatgtagatgccaaataagtacaagaaaagatgccccatataatatgatattagaagatttcaaaataaaatatcaataagatatgattatacacaaattacaatggtccagattcagaacactgacaacaccaaatgctggtaagcacgtggagcaacaagaactctctttcattgctggtgacacaaaatggtgcaaccacttttgaagacagtttgacagtttcttacaaaaccacacatagtcttataaaattcagcagttgtgccccttagtacttacccaaatgtgttaaaaaccttatgcccacccaaaaacctatgcacagatatttatagaagcataattaccaaaacttgaatgatgaatgaacattatatctagacaattaaatcttattcagttatttaaaaaaagaactatcaagacatgaaaaaacatggaagaaacaaatacctgttgctaaatgaaagaagccaatctgaaaatgctacatactgtatgatttcaactatatgatattctggagaagacaaaactatagaaacagtgaaacaatcagtgatttccaggggttgagaggagggagggatgaataggtgaagcacaaacaatttttaagacagtacaaatattgtaatgtgtactatacatatactgtattatagtatcatactgcattatattctgtataataatataatagtggatacatgtcgttatacatttgtcattagaatgtacaacatgaagagtaaattctaatgcaaattatggactttgggtaatagtaaaatgtaaatattgattcattaattgtaacaagactgccatgctggagggaaaagctgtgcatctgtgagggaagggaggatgtgggacatatctgtactttccgttcaattttgctgtaaacttaaatggtcctaaaaaataaaatctatttgaaagggggaaaaagacatttgaaattttaaacacataatgaaaatgcccaaattgtggtgataaaattttctgtatcttgattttattaattttaatattctggttgtaatattgtactagaattttaaattactttgtcccagattttttaaaataacttccctgaccacattattgttggccacctcctccatagtatctttaatctctttatagcacttattaccataaaaaaagcattctacactgacttaattatatgcctattgtcttcttccccttcataatgtaggctccacctgaacacaaaaacagtatttgcacctagtagctgcttgatacctatgtagtcactaaacatttgagtgagcagatttagttacagttatgatgataatggtaataagaggctgaggcaggaggttcactggagcccaggagttcaaggttgccatgagctgtgatcacgctactgcacttcagcctggggtacagagcaaaaccctgtctcaaaaacaaaaatggtgataatgatgattatggtgctgctaatgataacggtggtgaggatggtggtggtgatgacgatgttgatggtgatgatgtggactatgatgatgatagtgatgatggtgatgatgatgattataatgttgatgatgatagtcatggtgataacgatttacagtaagtttagctgtggtgggtcacattgctgtccattctcaaagatcagtcatagagctggtgctttgccttctatatatctactgctcctctatgcaatgaggaccccaacttctgttggagctgtggcttagacttatcctgagctgtggaagttgaattatccattggaaacatttccttgcccccttgattggcaaggggtggtctgtggtctttacagagcatctctagtctaggatggactctgcttctcttcataatcttttaatttaacccacataaaactttaaggcaggctgggtgcactggctcatgcctgtaatcccagcactttgggaggccaaggagggtggatcacatgaggtcaggaattcaagaccagcctggtcaacctggtgaaatcctgtctctactaaaaatacaaaaatttagccaggcatagtggtgcgcacctgtaatcccagctacttgggaggctgaggcaggagaatcacttgaacctgggaggcagagtttgcagtgagccaagattgcaccattgcactccagcctgggtaataaagcgagactttgcctcaaaaaacaaacaaacaaacagaaaacctctaaagcaaagacccacgtataatcctcatttgaagtattgaactgagacttagagacgtcaaggaatatgctcatttgccaagatagaaattggcaataggtgggaaaaatatctcactccaaagtttagattaactttttgacactatgttatatgactatagaaccatcccctttataaataagatccatgatttgtctttctttcataagcttgtgaggaagttctctgcatcatcctaagcttgggaacacctattattccttggtgttttttttttttttttttttttaacctatatgctgtgccttttcaagtccaaactcagtgtagatcatggttcatagatttcagagtggacaaatacatctggatctggcattagtctctttcataatctactaattatttacaaaagattggtggtgaccagtattttattaagtatttttggaaaagtctcagttcataaatattctaagctaaaaatatatttagaaagccaaatctgaactgaatttttgatgcacgtaactcttcttttcaaaacttactcagccactctgaaaattttccctcccataaaggacatgttgttagcttctcagagcaccttgctttttgtattcaggaaagtctttttattttcaatttgttatttatgtccttcacaatttttctaattttctgttttcagtagataagaaacatactggtatttggattttctataagaggagaatcaataaatgaataaaagaaggaagatggtatcctatgaggatgataattaggagggactgtatgaaagaaaataaattgctatcacctgaaaaaacataccatatttctagtcttggttcaggcaaatttaatgatgggaacttaaataagtctcctgcttcccaaggctgcttcttaaccatacaagtataaattccatgttcctcagtgatgcatccctgcttgtgacatgtccacctgttcaaaccttatcattaaccacttcacctttcatttcctccttctgaacattttgacatcaggttactgaactgcaaggatcagacagggatactgaggaaaccattgccatggtttctagcaatccagactcactcatgaacttcttgggagaatgagccctactgtggattcccagtccagaatcaacaggaaataaattgagtcacattatctctgacttcccagtaaactgcagaatgtcaaaaacctagtagccttcattcaatatgtgaactaaattgaaagatataaacaggttgtttctaaaatcatttttgttccaatattttgtttaatttactgcatgaaagaccaaagactagtatactagtctgttctggcattgttataagaaaattcctgagactgggtaattcataaagaaaggcatttaaccagctcacaattctgcaggctgtgcaggaagcacagtgccaggatctgcttctggtgaaggactcaggaagcttccaatcatggcagaaggcaaaagtggagcaggcagctcacatggcaaaagtgagagcaagagagcaaggggagagatccctcatactcttaaacaatcagatcacacatgaactcagagtgagaactcatgcatcactaaggggattgtgctaagccatccatgagggatctgcccccatatgccaaatacctaccaccaggccacaatttaaacagtggggattacatttcaacatgagctttgaaggggacaaacatccaaaccatatcacttcgtattcttaatttaatacagaatatcagactttggttccagctcaactcactgcagtcaccattggaaaatttattttatgagtaattaaatcttcttattcttttaatataatttatcaccactaacctgagtagctctatttcctcttggagctgtgcataataccactaagaaggtgcaaagactttccagagcatgggaacttaaagttctactatgtccacagcatcctctggctcaagcatagaaatcctgttccaggatgcttctaactgaaaattgtcatgtctgcattggctggaggaagtttttggaaaagcactgggaaggggtagtctggatttatcaggataccttatgacagagacaaatatcagaagtttaatacattctttaataaatgtaggtaagcatgatatgggtttgtcagctgttccatctcttacagctgcatcttctgcagcatgtggcctctcaaagattactgaggcaagataaagagcctaaggaggaggcccacaagctcttaactactccagcctggaagtgacacacatcacttgcatttacagctcattggccagaattagtcacattaccccaacataactgcaaggaaagctgggaaatttaggggagaacatgagacatttggtcggtacaaactgctctgctacacacccctagatattttgggttttgtcaaaatacattgtaaaactcagttggaacagtcaacaacagaagaggaccattcttaattcctcttattagagatttcaccaattttctgtcttttagtttgttctgtttggccttcacattatcctattgtgtcagttattctgagcagagtaaagcaagaaaacacacgagaaagaatagttttagagaatgtaatggatcaatggtattcccccttctaatagcttatttttatgcctattacctggagttgttcttctaatgagccttaaatgactgctgcaaattgacactcagaattgatgccctgattgcttcctgaacatcctacaggaaagttaatctgcgggacttcctgaccccaccttgtcttctattttatttcaataattagtatttaattagtgcatctgggcttttctcacctgccttttggttctgctgctgtccaggaccagatataaggtaaactgtgacccagactgctcaagagttgagttcatgaagtgatgaaaactttacccatcttaattagccctcacagagaagcctgacttcaaatccttagtaacccccgggggtcttgcttctctcgatactcagcagcaaagtgaggtatgcatactgcaatgggtacttggagtgaccagtgtttgaatagttttattttgccacactctatatgtgggtgtgggttaaatgatactcaagaggcaacaaaagtttttcaggggaattgtgggtggccatcctggaacgagtatcttctagctttctctgtcctgttgtgtcctacactgccaccagttcaaactttgctggggttcagagaagaaacaagcaacttggacttctctccctgttcctgggagcaccatcgggctcccaaaatagcatacagaccacggagggtacagggggccttttggacagcttagagaacacatccaagcctatggctcaaaggcaggacctggtgaaggggaaggggatcagcctaaacaggatccagagtgtgaaaggatcaagaacctggcagggcaaggcaccagaatgtcctgaggcacctgtgtcctcacacaccagctctactggcttcacaggctccttcctagccaaacatcttccaaatcaagagatcagggtcaccttgcttgggggagtaaagcaaaaacaagagaaggcagaaagaatactgaccttggtattacaggaattattaagaaattattttaggtagataggataaggggtccttggtaaggtttttttgttaaaagcagctccagaaatgtttcttttctagtagaaaaacagctcaaagggccaggctggcaagctttgatatgcaaatggaagccattagaaactaggtccatctaatggtgattcctgccctcttctccttgtcaccacgtgtgccaagcatcatggccacccccagagatctccacgtatgcagaatatcatggtggcctgcatttgcatgttaagatgctggggccagttttttcatgggccatataaatgacatacctggtcaaaccaatcccctggttcatatgcaaatcagacacctcctcctccagcctccccatataaccaactttttttctgcttcactcagggtgtcctctctccgctcgggacagaagggacagaggtcccttccctctgtctctgtacaaggcagattcttccttctttttttgcctattaaagtctccactccttaaaaccactccacgtgtgtccgtgtcattttatctaaattggcacaagacaaaggaccttcgtgttcctccagtcatcggagctgtatcattttggtgctttggccaggaatctgaggtataacattcatcagagcggtgagtatgggagcaagctaaaaacaatttttttaagcgtaaattctttagcatgggccataaaagcaggatatagcgttcaatctagcatgcccccttcattaaaggggccttgcccaattacatagtttttcttgagatcctttttttttaagggaggcacacaggacacacacgtctaggacgtcaaagggaaataataggtgaggactagggctaactgggtaagtgtgaccaggcctcaaaagcctagttcctctggtgccatggcttgaagggttatgcccacagtcatgggcagcacatttaacagggtgctgggacccaggaatcaggaagggaaaatagttcggggaatgcccccactgttttcttcatcctaggtcacatatggaaagaaaggagactaaaagaatgcttttattctcacttctctttctagatgggtaacaaatcatcttcagcatggactctcctggagtgtatattttaaagcactgggactcctctgaccccgagactctgaagaaaagccacctcatattctgttgcacaaggcatggctttcttaccatcttgggaacagacaaacctggcctgctggggggaaacttaattttaatattatctaacaggtcttttctgctgacagaagggcaaatggactgacatcccctatgtgcactttctttgccctgcaagacaacccagacatttacaagttctgtacaattgacccagttcttttagcagccatggcaggaaagcccaggaaatagttccccagagtaaaggaaggttccagaagagcaatctaacacagctattgaatgtcccaacccttccagtctccctccaatcgtaccatcagctcctccagctccaccatctccagtatatcctactcttcctccttcacttttacctctgtaggaaatgtctgatgggaatggtgccatgagggttcaagttcccctctcattacagaaccttaaacaaataaagggagactcaggccaattttctgacaaccctaataggtacatagaaattttccaaaatttaactcaggtgtttgacctcacatggagggatattatgttgctgataagtcagaccctcactgcagctaaaaagcaggctgttctgtaggcagcaggaaaaaaaataagagttgagcaacatgcctcctatagctgaccaaggagaaaaagaagaagtagggaaggtgagaaagaggtggaaactccattcccattagaaacggaagctgttccagtaaataaccttaactggaaccccaataattcaggagataactgaaaaaggacacactttttaaggtgcatattagagggactatggaaaaccagggccaattctctcaattacactaagctgtccacaataggccaaagaccaaatgagaatcccacagactttatggaaaggctgagagaagcactaataaaacacacctcttttactcctaatttagtcaagggacagctcatcctgaaggacaagtttattacacaggcagctcacgatattagaaggaaactacagaagcaagttatagaaccagatagcaccctaaagaacctcctgagaatagccacttttttttttacaatagagatcaagaagaggcccaagaaaaaataaaggaaatacaagagaagaacagaacctctagcagcagggttgcaagcttgcaagtccaggattcccaagttacctccattagctgttactgatgtagcaagtcagggcattttaaaaaggaatgccctggaagcaagaccaagccacttcaaccctgtctagcctgtggcagagaccactagagatggatatgcccccgaagacagaggtcactgggttcagaaccagtttcacagatggtccagcaggactgacaggtcctgggactcaaacctctggttctggtgactcagactgccattacagcacaggagccctgggtaattctggaaattgaaggaaggaaagtaaatctccttctagatactgaagccagtctctctcttctcctctctaatccaggcctcccctcttcccatagcatgaccatagtggtgtctcaggaaaacatctaatccaatatttttttcaaccccttagctgcagatggggggacctactatttacacatgcctttttaatcatgcctgaaagacccactcctttattaggtagagatattctagctcacatgggggccagcatccttaatgccccaggacaaacttttttctcccccagtggaagctaacattaatccataagtgtgggtaagtcaaggaaaaataggctgacctataactgctaggctagtacagatctaccttaagtatcccacttctcttcctagccagagacagtatgccctaaggtcagaggttaggaaaaagctgaaagccataattaataacctaaagatgcagggcctcctcaaaccctgtaatagcccctgcaacaccccaatattaggagggcagaaacccaatggggaatggagactacttcaggaccttcacctcattaatgaagctgtagttccaatccatccagtggtacttaatccttgtatcctgttaactcaaatacctgagggaaataaatggtttacagtcctagatttaaaggatgcctttttctgcatagtattacatcctgactctcaatacctgtttgccttcaaagatccagccagtccgcccagttaacatggatgctgcctcagggacttcggggtagtcctcatctggacaggcactgtcaaaagacctctctgagttctctcatcctcaagttagggtcttgccataagttgatgatattctgctctgtgtcccaactgaggaagcttctcaggaaggcactgaagctcttttcaacttctcagctaacagaggacataaggtttcaaaacacaatgcccagctctgcaaaacctcagtgaagtacctagatttagtgttgtccaaggggaccagagcattaggagaagaaaggattaagcctatttcctcctttcccctcccgcaaaccctcaagaaactaagaggatttgggggcaatacagacttttgtagactatggatacctgggtatggtgaagtagcccatctgttgtataacctcatgaaagaaactcagggagctaacctctcttttaacctgagaacctgaaactcaaaaggcctgtgaccagctaaaccaagccttgctgaaggcaccagctctcagctttcctgtagggaaggccttcaatctgtatgtatcagaaaggaagggaatggtcctaggagttttaacacaggctcgaggaccagtccaacagccagtgggttacctaagtaggaacttgatttggtggctaaaggatggccagcctgcctctgagacattacttcagtggctctgatggtcccagaagcctccaaattaatcctgggaaatgatttaactgtttacactccacataacatggcaggactactgcattctagggggagcctttggttaatagatagctgaatccttaaatatcaagccctgctgttagaaggttccaacatccaattaaaaactagttctctcctaaatccagccaccttcctccccaaggaaactggggaacctgagcatgactgtgaacaagtcacagtacagacctatgcagccagggaatatctcagggaaactcccctagagaacgcagactggaccctcttcacagatgggagctcttttgtagaacaagggatcgtaaggcaggatatgcagtaatcactctaaatgacatcattgaaagtgcatctctccttccaggcacaagcgctcaattagctgagctaatagctcttacaagaacaattgaattaggcaaaggaaaggtagctaatatttacactgacttcaagtatgctttcttggttctccatgctcatgctgccatttggaaggaaaggcattttcttaccaccaatggatctcctataaaatgtcaccaggaaattaacaggttattaccctcagttttctttccatgagaaatagcagtgatgcattgtaggggacatcaaaagggaacagatgaggtagccgaaggaaatagattagctgatcaggcagctaaatcagcaacaaggaagcctcaagacatcaacatgcttcaaaaccctctaatctgggaaggctccataagagaaattaaacctcagtactcccctacagaaatagaattggccacttctctatggtatacatttcagctctcaggatggccacagtcagatggctacagtagccaatggatggctactccttccattgactggaggctggcaaactcaattgccagcctccagccagtggaaaatcatttaaatccttcaccaagctttttacttggaaaaagataaaacttatcaatatgcccaggaatcattttcaggagaggacttactaaaaacagtcaagcaaattgttaatgcttgtgaagtctgtcttaaaaataatcccctgaacaggtgactccttcttcctcaaacccaaagaataggaaattgtccagaggaacactggcagatagacttcacccacatgccaaagacaaaaggcattcaatacctgctgatatgagtagataccctcactaactagaagtattttcatgccatacagaaaaagcctctaaggtaataaaagtgttagttaattacataactccccactttgtctacttaagtagctttaaagtgacaatgggctgttgtttaaggcagctatcactcaaggggtctcaaaagcactagccatggaatatcatctccattgtgcttggagaccctaatcctcaggaaaggtagagaaaactaatgatattatgaagagacatttcagaaaattatcccaagaaactcatcttccttgggtcactcttcttcccatggccttactatgaataacaaataccccttcaaaattagttcttagccctattgagatgttgtacggatggctttttttcccaataattttctattagattgggaagactctgagctagttaagtatgtaacctctctggctcacttccaacaggaattagcacaattagtaaaagcccaaccccaggacattgaaccacctctatttaacccaggagatttggtactggtaaagtctctcccttctctctctctccctaaacccaagctgggaagggctttacactattgttctttcaacccctttggcaataaaagtcaaaggaatcaatgcctggatacatcacactcgagtcaaagcctggagagctgagggaacaacccctgacagcccagaggaatgtcctgaatatcaatgtgaagaaataggaggtcttaagctgaaaatcacaaaatataagtaactgagtgagatctactcatcttagtctcacccctacctcaccaaatactttttgttgtttctacctctcctttcagatttgttgccaaatattagaacttattttgatggaaattattgactatgccactcttgcaagaattgctatactcgtgctactatttgcattaggactatacactgtaccaccctctgggtggaatatcagacaggaatctcaattactgtacgattttgcttaattattatcctcatagcaggaataacagttcctaactggaagtaaacatgagcattttactatcactaagtgttaaaactttttactggacttagtaatacatcacaccctttagctcctacaatattcaccatagcccatttgtacaataagactaattgttgggtctgtcctaagtggctcactcagttcgatgacactaagaaaccttaaaatgacccagaacttgccatcttaggatttcatttgttggctttacctctaacctttaaagacttatcagtcataaatgggacatgatatgggaggactttcaactgggtaactaactcctctcagagaacattctgcccccagtgccaaagaacagtttccctaaaactcagcttcacaccctcaggttgggaaaagttggcctagtaacagcaaatgctttgaaagcagtggggaaagcccatatttgggctcaaatattgtaacatcacatttgtaattgttgatagttcaaagatttggggagaagactgcaacaaaggggatctaacaggatcagaagccctagtggggggctttcagaatctagcctctccttctggttggaagtcctatgatgggagtggcatgctctaaacaaccaccttgactacaatgtaaagaataacacatgggccttttcaaacatgcatgcttatagaattccagatccttgcacgacgtttgctaatagtagtggcttacagatctgtgggcaaactggagacatctggactgacagcccttgccacaaggatcatctgagatattggccagggtataaaatgtctaattttttgaaactccatttgttaggtggacccttctcacttggcatgtcaaattccaattggcatcataaatgactatcttaaatatggttatccttatcccaaggatgcccctattatgtgtaaggaaggggaatttctaagatatgagaaaagtctgccactgtctctcacaaaccacaacttggaaccatcccttcaagaaacagggctagatattccttgtggctcctagatacacttagttctcccaaggcattagaagggaacttgtattacagtagcagtagtttccaacttatttttaaattctactgagttggcagcatcatcatgggacatacctaacttaggctcttttctagaaactgcactatctcaaatacaccggacaaagagatctatcatttctaagccctcacatggagatttagctgaaagggcagactggggaagggcatgcacatgacaatcccaacttgaaaaaaaacatggatgggaaattctatagccagaggcctattctgatttacgggcatccctcttcttgaaagatcagtacttactgtctctattatgatgcaacaaggatggaaggtaactataagtgccatagaggcacaacaacaatctatagaccctttatcctcagtaacagcacaaaatagatgggccttagatgtcctcacagctgaagtaggaagtactggtgtgcacttttaaatgaaacatgctgcttctgaattaacacttctagtagaggaaaatctacaggtacgtaaagatcaaatcaaaagtattatcaggctaagagaatatgtaggcttcagtcccaggtggctacaatccctctttaataaattccagacttctttatggaattggttagctcctttattaagccccctcttgcttatatgtcttgtattaacatttgaacctgtacactcaatactataacttgaattgtttcctctgaaatcaaactccaaatggtgctgcaaaccgaaccatgcaggaacacgccattcttccaaggacacttatatcgaatccaggaggagccctaactgctgttccccaatcgacaccccttttcagcaggaagtagccagaaagagtcgttgcccaaatccccctaacagcagttatggtaacgtctcctcaggggcgaatattatatgagttattaagaaattgttttaggcagataagataagggatccttggtaagtttttttcttaaaagtaactcccaaaacatttcttttctagcagaaaaatggcttgaagggccaggccagcaggctttgatatgcaaatgccagccattacaaactgggtccatccaatatggggattcccatcctcttctccttgtcaccatgagtgccaagcctcaggccccccgccccgcctcagagatctccatgtctgcagaacatcatggcggtctacatttgcatattaaaaggctagggtgaaagggccagttttttcgcggtctacataaatgacatacctggtcaaaccaatcccctgggtcatatgaaaatcaggcaccgcctcctccagcctcctaatataacctactgttttccgctgcacttgtggtttcctctctccacttggagcccccctcactctgtctctgtacaagggagcttcttccttctgttttgcctattaaactctctgctccttaaaaccgctccatgtgtgtccgtgtcattttatataaattggtgcaggacaaaggaccctggtgttcctccagtcatcgaagccgtatcattggggtcaagaaaacctgggtttaaaactctgcttctgttgtgtgaccttagttaagtagctcatcctctctggactcagttaacttgtctatcaaatagatgagcctcaagttccagtctttcagaaacagtctgagtttcttttttatttatttttaatttttgtgggtacagagtaggtgtatatacttatggagtatatgagatatttttatacaagtagcaatgcatcaaaattacatcagggtaaatggggtatccattccctcaagcatttattctttgtgttacaaacaatccaattatatacttttagatatttttaacatacaattaatttatttttgaccctagtcaccctgttgtgctagcaaatactaggtttttttctatgtttttgtaccaattaaccctccccacatctcctcccactccactaccccttccagcctctggtaaccatctttctactctctaccttcatgagttcaatcgttttaattattagctcccacgaataattgagaacatgatgtttgtcttcaggaacaccaaccccacccctcagtccttgtcccaaacactcagctgtgatcttcctaaacgtgccacttttagcccaccaggagaggagggtgacaggctgggggaagtggaagggaaaggcaaaaggcagatggcagctggcaacttgatcctttttgattcctcttttgcctgagagaaaaagaatgtgcctggtaagaatttaggagggcagtggcttctcatgcaccaagccagggatgttctttagaactccttacacacaagccaaccctctccccatacagtccttagcctgccaaggagaagttgaaaaatcaagggacactttctctaccactcctacacacaaagcaaaccctgtctctagaggtgtgttgggacaagggtcatacctgcagggacccaggcttaaccctctcctgccaacaagctggacacacaccccatggaaggctctcctagtgaggcctttcctcatcagccccaagtactgctcagttcaggctcttctctcaagagggaatggttccaagttagggaaatcaaatggaatccatttgtcagcctggagaggcacgccagtggtccttgcctgctgctgtacatttagtctttccccatggttacaggacagtttctgagtccctgccattaagaatatgaccacagggactcatgtgactaatttggctgcagtctctgttctctgggtctcaggaagaccctacctggaaaggttttgatggcccttggcctggagtgcaggggatggaccaagcaatttgggggagtccctgttatttacagcttcattgtgtttatagcagacagagaactagcagtctacactacagatgagaacatttgaggtccagccaggggaagtgacttacccaagtgcacacaacatctttagtagcagattcaggactccaaccctagtctccaaatgctatcacggtgtttgctctgctctactgcactaatcttggaggctgtattagtccattttcacagtactataaagaactacccgagactgggtaattataaagaaccttaattgactcacagttctgcatggctggggaggactcaggaaacttacaatcatggcagaaggtgaaggggaagcaaggcacgtcttacatggcagtagaagagggaagtgccatactcttaaaccatcagatctcataagaattcactatcatgagagcagcatggggaaaactatcccctgatccaatcacctcccaccaggtccctcctttgacacatggggattacaactcgagatgagatttcggtgggggacacagagccaaaccatatcatagcccaaccatgacaacaccttctctgaagtgtggcctcctccaggagggaccatggatttctgtagatgtaggtggactctgggtgaaggtgccggggccaaagatcctcatgtctctccctccactctctctctccttccccagagccctgccctagtcttacgtaagatcagcagttgctgacagatgctgctcagcctcagcagggactgggtgagggcaagggctggagagggctttaagcaggcctttgggatggagcctggtgagccagccctgtgtcaggaagaatgtgtggcaggggatgggcagagtggggagatggtggtggggggtgttggctattttggcaggtgcaggaacaaagccacagaaatatgtgccccatgccatagatgcccatgtggccctccaggtgctcagataagctatctgaaaccagagcagatacacagggaacacggatggaaagtaaaccagctgtccctcttgagaatcctgataaagcagaggccacccaggcctgggattgcaggctgggagcagagtttgggggtagaaggcaacctccaagatgttccttaatctctgtgccaggatcttggaagtcagagggtaaaagcacacctacagctgtacttgagctgatgctgtggatacacactcctaaatctatgtggggacagttttgcctactaggaaaggtcaccccatgaccagactactggctccttttaatgggctgagcagtgttggcaggctgctggctctgcagggctcagtgagaacatctgcaacatggatcttctccatgaaccccaaggccatgtggcaagccctcctcccagggaatggacttaaagtgctacaagaggtcagatacaaagcagagttttcattcaaaaacctaaaacaggaaactgtttgaggggggtagtgaggaccgataaagatcatttcccagtggttttaaaatcaagggatgtaagaccacaatctgctaaagctaccagattataaatccatagttcaggacccaggaggtctattggcttgcacatggatgcctatgcatgtgcatgtttgtgttcgttgatggcacattgtaggttcagtacataatgaaaatgagagaggaggaaagcaagtctggtggcagctgagctgactcttccacttgatctgtctctgaatcctcacagcccaggtcctgcctggctctgaaggagaaatggtcctctggaccaggccttcccctcccccatgagccccccgaaacctgcagatcttgcctacttgcgatccacactcttctgtttgtggacaaagaatgaagtcttgccattatctgctcccttctccagtcactcaaccacatgtcctgccttccagtcctcaaattcttctctcaatcctgctgccttgggaactactatgttgcatctacagctcctgtccttgaaagaatcctctgcacatgggacttccatttgctccacaccattccggaccccatcccctccacggtccccggtggcctctgagtcctgtggccttgattccccagccaggcttatcttcctccatgtgggcctccacactactagcagatccacagcagggccagctgaagccacatgcctgccagccagcatcctgagaaggaggagatatcaggaaagcaagaggcttgacagagagagacaaatgggttgggggataaagtggagagtgagaaagaagccaggctgctcagagaaaagtcagggaacctttaatctctgtttcccattctagcccaccagggtccagacttgctttgtgtcctggcctggaataatctagaatttaggaattgcttttcttaaaccctcccttaacttaagggtggcttactgttccttgtaagctgaacagcccttcaaacagactacagcttatttgtctggatgcctggaagagggatctgggcaactagagccctacaaagcccaatggacaaaccccagtagatcctgggtatcatggactgcatgtgtgaggctcctactgaccgttccaaggcaggaactctgttcaggaagctatgagacagtcacttatctagtgaggaaatccagccaccatccagcagccactgctcaacaccaaatagttactcccagcccattgtggatatccctgtccttgcaaagtgatgtaacaaaagtcaccttccagcacaacaattgataggaagagaaatccaagctgtagcagcaggagaaagtatgtgctgaaacagtgcttgcaaatttcaggggccacaagaggacaggccacttatggggtcacagggccactgtgacagtagagcaggtgggcaggtcaaagattggtgagtgggagccctgttctgtctccagagggtgctcaatgtcatcctcctccaagaggcctccccacccacctgcctacccagtggctactactcatttaactgccaaatgaagtcatcttgaacacatgctggtctctttagtagctgtgtccccagcaggaatgagggcagggacctcatgtgttggatgcacacatacaaatgagagggagctgtggagcggtgcccctgacatttccccagcagcctgccctcaatgggcaccccagggagagtgtgcaggcatgaagggccccacccctggagctgaagctgcaggaagaggcccctcggtgtcctctcaggctcttactccagaggagtccggctccactacctgggaaggcttttaggagcctctcctaagcctgtgtggggagaattttgcttactaaaaaagtttacgtgtgagagggactttccaaagtttagaaaatgagcatgtgaaggtcatctgcttgaggctcagaggggaaaaatgtatcagggtcacactggaggttccggcagagccagagctgttgaaatcacccaaagctctgggcaggactgaacccattcctctgccctgtcctcgatttgtcctccaactctcagctgtggaattggaatattcaccaagctccggccctggcagtgagtgaggtttgcttggggcagggccctcaggtcctggtacccctagctcagtgcaggcacaggagactcactggctggaagcgggccagcccaggggcaccgggaatcctgcacagatggggctctgagggcctctgttccctggaccccagatctgagacaggagccctcatccagaatcatggagccagggcagggctcctgccctacatgcttgtggggagtgggcacggctctgcacctggtctcaccctctctggttatggatagcaccaggatagtcaatcaacagagttctaatgattgaaagaaaagcattaaactacagcctgaaggggctgagaggcaccaggctgattttcttagggtggttggtcctagagtctctgaaggctcatcattctacaagctcacacagtccatgtgaggagaagaggagggacaagcagctgggagcagatcaggacctcagtgatgaggatatcacaggcacatggaggtatgtgctggaagctgatgagacagatgaccctggagttcttgaaggacactgcacctgaccctagaagtgagctggaagggatggacatctccagataagggcgctgagcccccatagtgctgatgtgcaccagcacagattccagtatctgctgtgcctgcagtgggacaaggtgtcagggcacacctgctcccagaggctgggctgggaagaagttggctgagtctcgccaatatccctgagccctagaggctctggccagacaggtccataggcagacagggagcagaggcaatgagacacacgggtgcttctgcaagagtcatggctctggcatgagggagacctcttgagatgcagactcgaaggtctgtcttggcaggatttgtcacacctgtggggcaaagagctagaacaaggaaaggctgggagaggaaggggtcaccggacaggaaggcaactaatagagtttggctttgtccctacccaaaatctcatcttaaattataattcccaaaatccccacgtgacaagggagagaccaggtggaggtaagtgaatcatgggtgcattttcccctgtacagttttcatgatagtgagtgagttctaatgagacctgattattttataagtgtttgggcaagttccttctttggtcattctcctttctgccaccttgtgaagaaggtggcttgcttcccctttgccttccgccatgattttaggtttcctgaggccttccaagccatgtggaactgtgaattaattaaaactctttcctttacaaattacccagcctcgggtattttcttatagcaatgtgataaagtactaataaagcacattcctttgcatgaatgatacgcccacagtgggtcagagtcctgcaatctgttggctgaaagggcaggggctctgcaaagctgcagggaagcaaagccagctgagggttctcctatgttcctgtggttggttcagaccagcctatgtgagcaggtgtggggcattctgggtggttggactgtgcaactgcaggcatattagtgtgtgcacaaaggggagtatgtgagagtctcccaccatgcacctgtggtcctctgccccagagctaggcccctccctgcccctcagtgtccagtgaggggtcagatttcttttcccactgagtcctgttgtggttgctgactcttttcatgcctcctgattgagagaatcaaggtggagatcagggactaaggcaggacagtgaggggctcaagatcccccaggcccagccccctgctcagggtattccccctcttcctgaaagggaagcgaccaatacctaccccttccctctgctatagtctgacccacaggcctgtccattgcccccttacctcccccgtatctacccctgaaatgactcattgctctaggggcttttcctcctctgccctgggcccagagtaagagacatcagggaaggaaagggtacctgggagtcttgatctccagactcctggaccttctgatccacacattgagccttgacatcaccacccctaagaccctcaagatctcctaaaaagagagccttccatcctagggtttagggccacttgcagcagcaaggcattttcagaggccctggattgaggatagactctgcctcactcccattacatccagaacatgctatagacacatgaaaaagctccctcactgtccctaggaagccatgtgctcagctaaggagatgggctcaggaacatgatggtaactcaaggttctgccaacattacttgacatatgaaaatacagagttttctagcactgccatggccaagattttggttttggagacctccgagctaatcagcctaaagatcccttgcaggccctgagccccccaccttctggctgtaggccgatctgccagttccttctccaagaggtggtgtttgctgactatacccacacaaacaatgaagcgctcagtgtgacaggagctcagagacttaatggattctgatctctgggaaccaagaacacaaactgctccctgacccatagaggtgaggtgcacagaccatgcccagcacatcaggtatcctctacacttctggaggggccccactcacctgcatagctgtgtgtatcctgccagtgtctctcccaacttcactgtgctggccgggagcctcatgctggcactgcagaatggaagacaggacagacaagccatgtgagacatccccacctcaggaagaccaggtctgtccctagggctggaggagtagtccccagcaccaaagagaacatggtcctccatcacagagtggactatgttgacttggccaaagtgaagaacttccagactccaggaatttttctccattcctgagaaacatcccactcagtaggacatccccaggatcagaacatcttccactccttccttctccccttctcttccaacaactatcactttcacctcaaagacacctcctgagtcagatccttcctttccatcttccccaccaaagcaatcaacatctatctgctccccggcctgccacccagagctcttcaccaggctgcttatacctcaaataaatctgatctggtccttcccgctcagacccctcagactgcagaacaggggccaaactccttggcatatcacacaaggctctcattatctggtccctccccctgcctacacctcatgcctatgtgccagccgacagaacacccatgctcttcactgtgcccttccacattctgttccttctattggaaatgccattcctccagttttccacctgaaaacatcccactagttcttcaagttccatgttgaatgtcaattgcttcataataccttccccagctctcacaggctgagtggttgcagctactcctgagctcctagccctgggtttgaaattcctgtccctgcacctccctgctcgagtggtctgtgtgtgtttcatggtctcatgtgagttgcttgagggcagcaactctgccattcatcattgtactcatcctcttccatccccaccccaacccccaggcctagcccagcagtcagcttcagtgaatgtttagagggcagatgaatacagcacaagtggattaaattcctaacacatacgtgcaactccttttcagatctgatatttttttcccaaagcatgatcctcagactcctgcatcaatgttatggagcatggggacccttatcaatcccacagatccacaggcaccaggcctgctgaggtagaggctttccctccctacgctgttcctggtctccctcctgaaaagcctcctcctccttcccacctcaagactaaaccctcctccttctttggtgccccatccaagccctgcatcctccaagcagctctccctgatcctacttccctgttccatctaatccagctacagtctctcctgttaatcccatcccttgccagatctggagccctgggcaaggaatgcatgttccttttgtgtatcatagggtacagcctggcacaaaggacatgggtggcagatactcagaaaacaatctgaatatgaccaacaggaaagagctggggcctccagtccccctcgccccaacctgcagattaaagtggtttctcagttgtctttcctggggctcatctgaagggggcaggaaaagcggtggcttgtgagagtcctggggaggtcggtggccccctcaagtcaggacgcttcctcctccttggatatcctacagcttccaccaagcgtcaactgtgaccaaagaagtctgtggacaagccttcattaaagacccttgtcttgtctggtaaacgtatctgtgaaaccccatacaccagtcagggtcacaagcccttctctaggtttccttcttgggaagctgttaactacctgttttcctatctgcctatctgcctgccagccctgtggggcaccgatcaacatcgggccttcagcctcctccctagggcctggcacacattagagacgcaatgcccagtgaatgagtgagtgaccctgtgaaccaaataatgaagaataaacactaggacaaggcaatatgagatttccccacaccgcatactttgtactgttggagcagtggcctagcagagagcattaggagagccctgctgctctccacctctcccctctgctcctgtgcaagcctcctaagtgatgccagaaactgatgaaggcaggtgtgggcctcctgaagcccagtgccatcctggcctgtactgtcatctgcagctccgaccttgcccactacgtggggctgctaatgcttactggcacccagctcctgggtcactaacctactctcctttatttagcacagccttgtctgcttggggccacccatgggaacccaaagcctactctatccagagcatggtcctatctagtccgaggctcctatgctgtgatgggtgctggattcctcagtttaccttgcaatggattcaagacaagggtgtgctgtgctcttacctgaaaggaggtggtcctggcctggagtatttgagggagctactgcaggcgcatcgagtggatgagggggtctgcctcttcctccttgctggggttttttacccagacagggcagggggagcatcacacagaggtctagagcccagtgggctcaggcagccacagaccccatgtttcatcccaggagctgcaggagaaggggaaagtgagacagtcctctgcctctctctcctgcctccttcaccttctgtaagagtggttggtggataagcattcccttggggccaggtcaccaggcagagcttcctaggggagcttccggaatgatctgaggcttcccaagagtctgttggagccctggagtccaggcctggatgaggatgtggtagggggtaccaggtctccctgccccatggctggtgccccttgaagtctagcagcctgccccatctcagtccctgctctgaccatggctggaaggaggcagtggggaagagactgccaacaccaacctgccttagtggggtgggtgagagacagacagggagccagagaccacctgagtggaaataggaaggagccctccagggtggagggtggaagggtaggagggagaggacactgccaaccaggagtgtgactagtgagaggcaggagactacagtcagagggcccaaaatgccctgctctgcagaggacggcagtttcttccaagggagggccctttctgtctgcctctcagtggtggcttggcctcctccgagaggccggctgctcctgggcctgggctgctctgaggctgcagtcttctttggagccagcttgatgtcttgtcaggctcttctttaggactggtgacctctcgaagatcgatgctttctcagacaccagtctcctttctgagcctggtgtgttttctgagacacttgtcttttctagaaccgacctctctgagatggacttttgctttatcaccactatcttctcctacactgatgcctttcctggggccagtgtcttctctgagacacctgtctttactggaaccagcttcttctctgagctgtcttttctctgataccactgtcttctcagatagagatgttttctccaaggctagcaccttcttggcgatggaggttttttctgagaccagtctctcatccagtgctgtcttccctagcatggagtatttctctgagaagactggggacttctctgttttttttcctccctcatggctccctgctcaccaagctctcctcctccagggcccagggaccccgctgctcctggctttgtctctggtgaggtggggtctccagttccttcttggggactaggagatgctgcacgtcctgctagggtcccagcttcccctttgctcctctgccttctgcctctcccagatgggtgcccatgcagccttcaccacctgctacctctgccccttctgacagattatgatagcttggatgtcctcctcctcatctttggaggctggggcagcagcttggaaacctctacttcttccatgcttgagagtctgagtagggaggtggagttggaaatataatcacaggatatcagaaatggaagggaccttgggggcacctaaccaatggagatgccttcaggaccaccatggggaatacaagaatgtcaggccctgccctcctccccaccaccacttaaataaggattatctttacctactctacatattaggcttccaaggggtcattgaacaaagcaagccatgcttttttaaaaagttaataaacccctagtaaggtccaactattccatgtttagacatagtcaaaaaaaattaagcaactatattatatgtgccagaccctgtgctaggcattgagggtcaaaagaaataagcacagcttctgttccttagaacttagatcaaaactagaagtattcagggatttgtcaaaggtctcacagctaattgacaggagagcttggagtgaaagcgagggcttctgatgcaccattccactttcctgtcagtcacatgggtacagttgagaccaagtgatagccacaggtattgctgcggcctagggcacatgccctgttctccatcctctggggcacccagggaaacaacagcatgagaagactgtcaaaaacccacagcactcggcctccagagaaaggagattcttttccttcctcaactacctcttctccatgtgatttcaggcaggttaactcactttcaaagcctcggttttcaaatctgcaaacaaggcttgcaaggaagtaaaaggagactcatctcatgagagtgcccagcacagtcctggcatgtgagtggcattcagtaaattctgggcccttctcttcctttcctcataatctcaaagtctagatggcaaaaccagttctaatgttcctcccctcagaagtgaattatgggggtcaggattagagggaggcaggctggctaacaggaagaggtgagccccagagctggacagatctggatacaaactctggtcctgctgctctgtaggcatatgattccctcagtatccttcagcccagtttccctttctgtaaaatgggttcacaatacctccctctcaggaatattgtgagaactaagtgagctatggccataaaatgtcccacacagttttggctcatggatgatctcaatactggcaatcattgttgtgaagagggtggaacctagcaggtctgaggggtctggagaaggtgaggaatttgaaatttatcttcacaaccttcagcttcattctctgggcttcagtgcttggccggctgaacacgctgcacgaaatctggagaagctaattcatccccaccacccaggataccacaatggtaccctggcccctgccttgacctgagcacttctcagaggcccgacgttctccatctggctgatcctgggagcctcgtcctctgtggtttagctctggctgcagtggcaccatctgagcttctgctcctccttatcttccaaagaccactactaggaaaggctcagggaggggaggagagggtcagcacagcacggagaaacataagaccctccccattgcatattcctgtggggctgaaagaagagaccacataccctcctgcctgcattgaacacaagaggctgtcaagtgcttgaaatgcagctggtctgaacagagacatactgtgtgaaatacacactggattttaaaaaccagttaaaactctcattaggaattgtgtatactaattacatggtgaaatggtaatatttttgatatattggggtaaatgagctatcgtattaacataattttactttttacttttttaatgtgaccactcaaaattttaacattttaaatgtagttcccattatatgtctattaaatttctactaaagctgtagggatttgatttaaaccagggtttctccacctcggcaccactgacactttgaccagataattccgtgtgtgagtctgtcctggattgtaggatgtttagcagcaaacttagccaatacctgctgggtgccagtagtagcatcccccagctgtgacaatgaaaatgctttctgacattgctgaatgtcgctggggggcaaaatcacctcagatgagaatccctgggctggacattactctggacttcagggtgggaatgtgaggcctccctgcctgagggtgactaggaatgtggaagggtgggcatggttatgcctgaaggaagtagatgagcttgccaagtgcctctctctttttagtcctgggattcttagataatactccttgacagacagtcagggtgagatttcctcagagttactcagttccccatggaatttcttagctttggggatggggagacttgcaaataaaaccaattacacctgaaaaccccgatatcatctcctctttgcttcccaggggctcttggggtctctgtcaccttctagttgaaaagagctgagtcagagagcttgacagatggtgatgaaaatccagaaaactttcacttgtctggggagcaaagggagcccacacaccatacttttggctcctgccccaatgacccttcattcacgtggccatccaggtactctcgcagccagccagtcaagccccaccaatttatccatctaccactcactcacacatctgtgtacccagccacccacccatttccatcatccttgtcccaccttccctaccacacactcacccactgccccccagcccatcctcccttccaaccaccacatctcttccaatccaacaaaggagcaaatgcatacttactgagcaactgtgacaagccagcaccatttcagcaactgcggtggagtggggaggggggtcagagaacatagcagggtatctgccctggagacactaacaacctagtaagaaacagaagaacgtccaccaagaaacagaagaatgttcaccaataactcccccaaccaaagtgcacaagtcactctgcagagtgagaacacaaatgctacaagccaagattatccggagaggctcaaggaagagactgaacctaggctggatctcagtgagcaaccaggcttcggatgtggtgactggcagtccaggcaaaggagaagtactgagcaccccaggaggccagaagtttcggggtttgctggggacaaaaaggctgtaattcccaagggaggcaggagagggcttgagcaggggagtagcagactgagagagtcagtcaggtgagcccctcctggcacctccctctgtctcccccatgcttagacctgggttggaaaaagcctccgtcttcccttccagagttacagcaatgactataaggcctgcccttgccactcctgggcaccaaactctcccttctttttgctctccagcctcccttgctgcccacctctagttcctactgagcctcttccctcctggatggtataaaacagtgccacatggagtcttaggtaagacagagtcaggtgatctggtttctagtcctcctgcacttgggtaagtcatttccttttctctttttccattttccctcctaaaatgagaaggttcaaccacaagacagctctcatttttttctaggtccagcatcacatgtattgagccaatattcactaaacgaatacttctgagcatctactatgtgccaggcatgcttccagggactaaaaccaagatcctccccttcatggagcacagatccagagtggaggagagtcagaccatgagtgaggaaaacaagctcatgaacaaaatgagataagtgtcactgggacaacagaacaaagtaagcaatgtgggagagggtggctgggtgatgaaaccctctgagagatcaggttcatgaggaggaggcagagctagatctggcagccagagtcccaggaggagggcacagcgagtgcagagcctggatgtgaggaggtaggtatctaagggaagagggtacgcgtgggccaaggagtagccttaagggaagttggacaaggtgccagggttagagcatggggtcttggagaccaaggaaggaacttgggttttaatcaaagtgtgctggacagccctggagagttgtacacagagaagtgacagggtgggatttctgtagtttaaatctctctggctgatgtgtggaaaaagaatggaaagggcaggggaaaggggaaacaggagacctgttgggaggcacctgcaattgcacaggtaagaactatcatgacttgaactgacagagagatatgggaaagggatggattcggggcacattctgaagatagagccaccaggtttactactatattggatgttggacttgggggaggcgcgtggttggtgaggaaagaataattaagaacaagatttttggcctgagctattcctggagctaccatgagcaggacaggaagaccaggggagcaaggagtgtgggggatgttgggtggtagaggggagggacaggagggaaatgaagacctgtgtttctggtagtgaaaagcaaaggagatcaagatgctgcagtcaggaagctggaaaaataccaagccagggcgttggcatgggcaaaggagcgagggcctcagtcaaatgctgctgtgagggagaatgagaccaggtggagtaatgagtacaggggtgccaggcttcctggaagcggcagcttcagtgattgtgccagagcctgacccagctggtgaggatgaatgggaacgaagaaagaaattagtgattagcagcactcttttgagaaatattactgagaagaaaagcaaatagaaggggacagtaagtacccagaagaggatgtgaggtcacaggatgctttttttaagttgaggtataatttatataaatgtacagatcttaagttttgcttttcttagaaaaaatgagcaaatgcaggagagtagagagggcctgaaaagaaagggtgattaagttgtcctgcagtgagggaaacaactgcaggatagggcctctttcttctctagtacccagcatggcacctggcacccaacaagtgcagaccaatgtagaagagcaaggcaatgtcaatttcaggagtgcagggctctcctcctccctaggaactattcaacctctgccttgatactgaagagcacaaagcaggagaaaactctatgtctttcccaaaggcaatctgtctgtctctctttccgggaaggtgtgtgcctgccaatcactctataggaaaggatgtacctttgaagaggaactttctggaccctcttaattctgccatcagtgcagctcttccaggttagaacctcagtccctctgtcagtcttacctccacttcctcatgcagaagggccccagtcaaatgtttctccccatggccttcatcatggaatttaagcgaggttcccctgggcctccacatgactcctgtgagctctgtagaatgatcattcatcgttcattcactgcataccaactgatggtctcttatgaggtaggattcaacgtcgcacctctccttggttttcttgttcaaagttagaaatgccaacttctgctgtctttcatctgataccacatctccagcccccacacccctgcttctctggatgcacccctgccccttgcccatagtctaggaacagctcttgccctccaaagctgagggattcatatactggggaaagtgacccacacagctcaaagcacctcttccctgagctggctgggctggagcctccaggacccctgaatcctgagcaatccagtttccacatactgccctcagcccttggggaagtggtctatttgtttaccctccagtgaagccttttatggtgtctgatcagagcctggtctccttggaattgactcattccccaggctggttctggtcctgagaggtctccagggggctgggctatagaagatggggcccaggcatctttgaatgtccctgagctttacaccaagagcccacagctcactcaaggtgatgtggctaccactcctgctgcttgggaatcatgtggccaccttcaacccctgacattggcaaaacctgagtcccttgagaatcaccatccaaccctgggaagaaaagctatctccaataagcaaaagttatgaggaaattgatagaaatggaaggcaaaggtcagtccccaggagggaccacagcaggtgcaggtgttgagacccctatgagaataaattaataattaggggcttagaacagtgcctggcatttgttgaatgtggagaataataatcagtaactaaaggaataaaggaggaagaaaggacactcacatgtgtgcttactccaatgagaggcactgctgtaatgtcactgacattcctctttacaacagccctgggaggtaagtgtgtgttatccccattttgattataactttcccaagattacgcagctagtaaaaataggaaaccaggccagatgcagtggcttacgtctgtaatcccagtacttcggaaggccagggcaggtggatcacctgaggtcaggggtgtgagaccagcctggccaacatggtgaaactccatctctactaaaaatacaaaaattagccaggcatagtggtaagtgcctgtaatgccagctactctggaggctgaagcaggagaattactggaacccaggaggcagaggttgcagtgagccaagatggcaccactgcactccagcctgggcgacagaacgagagtctgtctcaaaaaaaaaaaaaaaaaaaaaggaaaccaagattttaatctagattagcatctcaagtgcccatacccttaaccactttactactgccagaaaaggctgctgaggaagcctggccctaaaccagagtgaggttccacctccttgggagctcaacagctgagcattcaggagaaggaacagaggggcctctgaggtgtgggctttcccaccccggggcaggctgcagctcagggcacagcctgggagggcagagttttggggaaacccagtggccagtacaacattgaccgtcaaggccagagccaggcctggggtgaaacctaaaggccccaacaactgggggtcccagccactctccctagctgagggcacagccccaggtggctgcccaccactgcttccctccgaacaatgctttccccctgtgctggccttcaccaggggacacatttccctccttatgcctgcatgtcatactgctatcctccctattccagacttcaccaactccaaaatggggctccactttttctcttaaatatttctaaaagacatctgccccgttactcattggagagcttgttttgacctctccttttggaattttcttcctaaagtttaacttccatctattatgtagcaactgatagcaagggtttaagtgcagtggttagtaaaggtcatgtttacaagtaaaacccattttcccaaactgaattataggtagatgcttcttatacaacagatcaaggctcggatgctctggttaaagtagggagagggtgtgaaggctgccccagaagcattttctagaaccctggggctcaaggagcataatttgcaattcttaggggctaggatagagaaagggagaacagaggagaaagctgcagtgggggctggccatgatcttggacctaccttcattccctaagcggggtaggccttaggttccccttcaacataaagggtcactgtgggtggtcactgaggtcatttccagccctgatggttttgggcaaagtgttgggagtccccagggcagtgcatggaggtgggaaggcagctcaagcccctgggaaatgattaaccactggctactcagtcccaggtgctctcagatccacctctcacctcctgcagacaggccagtccagggagaaaagatcaaggcctctgaccagggcacccagccagcccactcaccactgcccctatcccaggactggaacactcaatttactacttaatgccaagaatatgctgcaggctggccctcagctgcccaccaacctccccatctaaggcctccctgactaaggccatgcttgtcacactctcagcacattcctcccaaccctggcaggctcagttgacagtgaccttctctcctgcctccccactgaggcttgttgttcacttagggagtgaagcagaagtgctcctctgttccaggtgcctcatcagggtgactgttggcagcagctgctcctgcccatggggctatatgagagctaaggctgggcagaggtgacagaccaggggcccctgtggctgaattggtttcccagggcttccctggcacttaccctggacatcctgtgggaacttggccccacccatgcacccacatgagtccatgttcatcagagcaatggacaagctaaggccagactttgctcccatttccagtgctagctgcctccccacaccacacacccctgtacatatgcaggtgtgcttacagacataaaatgatatatatcccaccagactgtgaacttctgagaaagtagtgtctggtttccttctcaccagagactgtttctgagaaagaagggtccttggcctactgcaggcccagaaacctccttcccactggactgcatgagggcccattctccatttctgatcaagggcttggattctcatgtagaagtttattatcattcaaattctaattctatcttgcagatagaattagaagccaggggatgaccttggaaaatacagtctatttcgtccaattgttcttgcctgtctactccatgtaataatgaagaatttgctcctttaggctctagcgctgacaaggggctattgtccatgggagtgagattagtctgctagaacacaaaagccacacacataaagggctgctttcagccccaagaagaggcacccaggccagtgccaaagcgagagagggaggggcagggaggctcctgaccagattctgctcatgggggaattttggccagagctgagcaatacatctctaccaggtcacaccacaaaacacggcctgtgtcaagacaatacacctatctgtgcttcagttttcttatataaaattgggtggtgatgatacctactcttgctcatctggtggaattataatcagtaacaaacaagtaatataatgtatgtgaaacctcattcattcattgatttttttttttttctttgaaacatggtcttgctctgtggcccaggctggagttcagcagtgtggtcaccactcactgcagcctcaacttcctgagctcaatcaattctcccacttcagcctcccaagtagttgagaccacaggttagccatgcctggctaacttttactttgtttttttgtagagatggggttttgccatattgcccaggctggtctcaaactcctgggctcaagcaatctgcctgccctggcctcccaaattctgggattacaggcctgagccattgcacttagcctattcattgattttcttttttaaaatttttcatttgtttttattatattttaccattcattaatttttaataaacatttacaatatctgatattcataggcatcagacatgtgacaaacatcattctaggtgaggcagctaatgtaatgaacaagatccagtctgaatgtccaaggaacaaagcaaaatttgcactaaccataaaaaacagcaatgacggcggtgaggatggtggtggtgatgatggtaatgatagatgttcaccccagaaggctctgatgcctggtgactgatttttgtgtgtggtgattgttcctcctcttgttcatcttggctatgaactaagagagattaaaatgcttttgtacaaaggaaaaagtatgcatattctatgaaatacatttctctgcctgtttaaatgtagcattttcaagagaggcagggatattcagtgttcaccacttgggtgaatggatgggttttcagcatcaggcctgggaggccctgaccagtcatgtcgttgatctcaggcctgtgggggtaagtgtgtgcaggagggttaggatgtggcatgtggccagggagctttctttcctccctgggcctcagtgtgtccacttgcaaagttaaaatgtctactttcccattgcttaagctttctcaagctaatttaccacaaatcaatctgctgagattcaccaagatgataatggtttaccagagaacaaagagaaatgttatatatatatatcttagatatagattatatatgttatatatctgtacacatacatggtttttttttttttgtattttttttttctgtagcagcagtcttactatgctgactgggctggtctcaaacttctggcctcaagcaatcctccttcccgagttcccccaaattctggggttacatgaatgagccactgtgcctggctacgcttcatgcttttgaatactttttgattgaaataagacagaaatacccatgagctagtattacacagcaggcttctaatggataaagacaacaaacaccccctactactgagtgttctgctgtggcttttaatagtatttacaggataactaagtgaaacatgaagaaaaacagaaaaagaagcggtgcttgtataaagttcttgtatagaaagagaataaggagaaaaaactatcaaaaatacggaatatatagcagacctgttttctgaagatagtacctgtatttctatagtggtgggaggatggagtgcagaagagaggtggtaggagaatgagatttgctacagtacacatccatattgagggtatcatggcaagttcctgttccctatgccacagtggtacagttgacaaattcttcaatagaatgcactctcaaacatcaactttataaattatctgaaaatataaaattataaaagaaaaaaaatcccaaagcatttatttcaaagacaggctaaataaaatttgctaatgacttacttcaaatcttgcatagcaatgagtaactttctttccttagatattcatcctctttaagctaggatttagattaccataactatattttatgattaactgaatagcttcattagcaatttcttcatcaggtaatttcatggttattttccaaatgaaatctattcccatcaacttcagcttttctacattctgttcaaaagaaaaaaacaaattatatagcacaccaggatcacaaaattacagatcattatttcctgttacatcttgagtccacaacacttcagttcaacatgaatcaaggcttcaggacctcagctatatgaaaacactgtcatactgatatggaacttgaaaacaaaaacccaccaaccacagaagcaccagcaacctctgtgggagctagagtaagtatggagagttttcttcatatgtccctaaacccaaagcagacatacacatcgacaggctattgaagcagacacacaggaggaataagctgggcccaatcttcataacttttcttcaaatggaaatggactcaggctagaagtggctactaattcttggggttcaagctagtttctccagagctctgttagaaataccaggatgggccaggcgtgttggggctcatgcctttgatcccagtactttgggaggctgaggctaggagttcaagacaagcctaagcaacagagcgacacccatctctacaaaaataaataaataaaaacaaataacaggatacaggctttacaagagcttgtaaaaatttttaccacccaaagaagccagatacttaataaaagggacttgaaagccagctctcactttggtccaaggtggccagaaaatggggggcccccggggaaagggccgcagacacctgtgggccggctccgtgggtgtccttgaacttggatggtggtcccgcagctctgggcgccacgcagactgctgtgcccactggggctgggctcaccaggaagtaggatcagcagaaacgcgggcgctcacaactggtgccaggttcggtttccttaggcctctacccgcagggccccgtccctaccgtgcctggtgggtgcttcctcacctgctgctctccccacaacggggctgctcttttgcccaggggctctggggcggtcccggccacccagagcgcgaggtcgcaggtcccagtactcatgccggaggccctgacgtgctgggggtgcccacgcgggcctgtggtccccacgccggcttgtggtccccacgcctggctcgggcacctgcagagggagggcgccctcttgagtcggcgccctctgccgcgctgttgccgcccccgcggctggaggtcagctcctctccccggccatctaggcctcagctctgccctgccccctggccgctccgctatcctaccccctggccaccaccagaggaagaccccttctttccctagctgtgcccgcacagtgaggccctacccgcgggccgcctcctcccgctgctgccccagcgctgtcctacccccggtcgcgtcgccgaggcagccgccacaggtcggtgctaccttctgggcaccgaaggagggaactctcctttccccagccattccgccccactgtcctgccctacccaatggccgcctacctctgactgccctacccctggtctgcctgcctccactaccgcccgccggctgcctgctgccccagccccctccaccgtggcagccgctgccaccgcccaggtagtgcaacatcccgcagcggtctccttagcgcccgcaagttccggcctccaaggaggacgctggcgggtggcctcggcgccggcttctcctctggcagagcacaaaacagccctgggcaaaaaccacaggcaactcaaacgctggaccaggccctcagcaggcttttataccagctttatgcaaataaagtctcctggaacacgtgttctgattgaatgagagcaagtctataggacaactctgattggataatttagtccaatgagattaggtcaaaagcttccttctcatcaatcagaacatgtgtcctaggagcctgcacttgcagaaggtgggtatatagctgttgaggtgggtcagtcttctcgtttgactctcttctggttctgtgtgctgtgctgtcctgttctggcaaaaggaggacgagctggcctacctgctgggcggctttattggagactggagtctgcggatggctgcagtgagatggcagccgctaggagggggacctatggcaacaggaggttggttggtgggcggatggcacgggaggtagcatcgctctgctggtggtggcctagcttcagcgtcagcggtaccggtgcgaccaggttaccaggggatgagggatgtgactttggagttggaggctggggggatagaacactgctggggaataaaacactgctggggggatacaacactgctggggccgggggaggagggtggcacagtgttgcagcaggtagcggggccagggaaaatagggttcatatttccggttgtgacccagccaggcgtgggggacagcatgcccatgcagatagcctgggaacgtcaggattcctgccgtgggttcccaggtttgcatccttgcagtttgtgtggccaggactgcctaggagccactgggcagggagcagccccattatgggagagcagcaggcaaggaagaacctagggggcacaggagggttgggccctgtaggtagctgcatcaggaaccaggaactcgcacctgcatgaaaaggggccaccaggtgtgaatggcactgagggactggttcccagtttctgctgctcctaattccaccacatcgtagctccagtggtcgtagtttgcgtgatgccccgaggctcaggacctccacccaagtgcggaaccaccgccgggagccagggactgtgctgtccgcagccctcacccccggggccccagtttctgcaaagagaggctgcactttggagggtgggtgggtgtgagtccgtcagctgaaacctggccccttatcccaagtggccagcataacacggtgacacaacttagtgtcaccactctcctcaccctactcttgagtcagatggtctgaggggcctggtggagtgtgttcaaccgcaggaaggggcagatgtgagatggtggtggggcaacagacccaagtcggtagtcaaggtctggggggatgtggagggtcttctagcagaagtggaagggccatggggctatggggtcaggagaggggtgggtaagccaggcccactctacacaagcaccatagtcctccagccaagctggccccagcacgccgggtgccatcctacccctatgtgtgttgttaggcaccaggcggcctggcacagagcaggagcctgcctcctggggaaatccagctcccatccacagcctggcagctgcacgcacagaggccattgcccagggagcaagtgggtttgggggagggtggtcggcccagccagaaagagaaagagctgggagtagagccacctctggctgggctttaagttggggtctttccagacctccagggctccaggctgccagctgcctgctgaggttctgggtttcctccttagccttcagtttcctcacctgaccagggggacctatatggcagtgtttagattattagacttgttactttgggaaaccctcagcctactggctctctaaatttttttttcctgactttaaggatcttttcaatggattatctagagatggggaggcaggaaggctgggatactttctcttggcttaacagtcccttcagggcattccactccttttaggatcttttaaagcacgtgcctagcaactcatcctgtacctgagagagctgggaagaacttcatgcatgtccagtactagaatgatgtgttccctgaccctgggccctcatctcaccccaaaacctaaatccctcggagcaaccagcttcagacacaagtctgaatttgttgcctgttgtctgagattgacccaaggtcttctcctcatatgagatggggatcccaggccccctgtatttaggatccaaccaccagccacccttgtgggcccacctgggcctcttcactccacttgtgtaggaaagccaaatgtccagacctggtgtcctatttgtatctctctttttctcagtgtatgtttgctataatggcaatgatacagcatttccatataagtttcgggatatggaatgttccccaccccagaaagtccctacatcagcaagccctgattccaccccctttgggctggctgtgcatgtgctcagcttgatgaaaacaaaaatggcctatgcagtctacactgctgagtgtgatctgtggacatagcttcctgatcctgcatctccttccccctcattactgaggtctattctgtctctcacttttcacctgaactgctcctgaagccaagatgaggaatggggagggtcttctcctggggtaaatctttgctctgaaaagcctgggcttgccccactctgttatcccctcctttgagctccatttctgccagaggttggcaagatgcagcctatccctgtttggtcttgtgcctcctataagccaagaaatagctttttattttcgaatggtagaattcatcaaaagaataataatacttaaggacattttgaaattttccatgtccagaagaaaacttttgtggaggtgcagtcatgcctgttcttttacagggtgtctgcagaaggctgctgtcctgctacagtggcagagttgagtctttgggacagacaccagtgggaaaacctgaaaatactgacccaaggccctttagggactgtttttagttcttgatttgagagttacatagtgggactggaggctttgcaccaaatcttttatcactcccactgctgtagtctctgctggtgtgtctgtaaagttagggtaccatggcacctcccttgagagtattgagctccagtgtgctagttttgggggtgcctgcttcatggttgcttatcccacctacagaggtcctgggcctaaaccaggccagcaggatgagttggtcattggaggctggagcctgcaggtggcagaggcactatggaagctggtgttgctgtagtctgtggctctgggggtggtggctcctgctccctggacacccaggatgtatctttctgaatttggaaaccttccttaaactgccagcctcaggacccagcctgataatccccaacaatcacatgtaagtgtgcatttgatacatgtagtgtatttgcagagttatggaactataggcacagtataattgaagtgcatttcattcatccccaaaaggtgatgctgtttgtggccagtccctattaccttctagcactagaccactatacatctcccctctgtctccagagatttgccttttctggacatgccttgccagtggaatcacagaatggggtcatttgctgctgctttctttctgtcagcttaatgtgtttgagttccattccttttgtaatgtgtattattactttattttgattgacaaaaaatataataaagatataccacccatgtttttcctttcattccttgagatgtattcaggtagttttcatcatgaatagtgctgcagtgaatcttgttgtgcacgtagactttcatagcttataggcgcataactgggagtggaattgctgggtcaaaacaatagttccttcttaaacattttgagaaattgcctcattgtgttttaactggctgcactattttacactcccaccagcaatgtgaggttttcctatttttctcattcatgacaacactttttgttgttgttggattacaaggtgtaaagtggtatctctctgaggttttgattataatttccctaatggactaatattgaatatatttatacatactatttaaaatttgtatatattttggcaacggtaaaaatttctattaaaatctcatttttaaaattgtatttttgtctctttatagtttgtattcttaagtttaaagttacagttttaaaaaaattacagtttaaaaaagtcttaaaaaacattttagtttaaagttacagttttaaaaaaagttacagtttaaaaaaaaatgtccttccctatgtgttttttggggggttgtattttgaatagtattgtttctttaattatattttgagaatattggtagtgcacagaaatgcaattgatatttctatcttgatctcgatcgtctgcaatattgctaaacttattactttgagtgagtttttactaaatttctcaggattattgttattattattattattattattgagacagtatatcagtctgttgcccaggctggagtacagtagcacgaacacggttgactgctcccacctcagcctccagagtagcgggttctacaggcatattgccaccctgcccaactaatttttgtttattttttgtaggaatgagagttcactatgttgcccaggctggtctcaaactcttggattcaagtgattcccccactttagcctcccaaagttcaggggttacaggcatgaaccactgtgcctggctaggacttcatacatatgagattatgttttggatatgaaaaggcaattttacactttcctttggaatctggagtccttttcttcatttgttctttcatgtttttttttttatgatactttaagttccgggatacatgtgcagaacatgcaggtttgttacataggtatacacgtgccatggtggtttgctgcacccatcaacccgtcatctacattaggtatttctcctaatgctatccctcccctatccccccaactccccaacaggccctggtgtgtgatgttcccctccttgtgattttttttaacaatgtcatcaaggacaatgttgaatagaagtggcaaaagcgaatatttgtgcatcttgttcccggtcttatgtggaaaacattctttccactaagtatgacgttttctgtaggttttctatagataacctttatcaggttgtggaaattctcttcaattattgatttggttaaaattttcgttatatgctaggtatagtgaattttttttctgtgtcaatccgataaccatctcttggtcttccatcacttttacaatatggtatattacattaattgttttagccgctttattgagatacaattgatgtacagaaaactgaatgtttattatattcaatatgttaggtgtggacaaacacttgtgatatagaaccacaatcaagataataaatatatctatgttaattgtaatgaccacagggcccacacatccagggacttgagaaatcatttagaagaatggatatgaatggaaacatcaagtttttttagttgccacataaactgcatatctgtgccacaattcctcttggtgtaagggtccttaattctttttaaatgttgttgggtttgttttgctagtattgagaacttattttgtcaaattcaacaggggtagtgttctgcagtttttttcttttctcctgtggtttttgtattatagtaattctggcctagcataattaattgggaagtttttccttctcctttttttcatatttgtaaaggattggttgtaattgttcatcaaaaattggcaaaatacacatcactgatgcaattgagattgggcatattcttggcatgaagatttttattatttttattttagattcagggaaaacatatgcttgtttgttacaagggtatgtggcacgatgctgaggtttgggctttgactgaatgcatcacatatgcagtgaacatcatacccaataggtactttttcaacccttgtctccttcctctccccaccttttggagtctccattgtcttttgattcccatcattaattccatgaggacccaatgtttagctcccacgtataagtgagcacatgtggtatttgtttttctttttctctgttaatttgcttgggggaaaaggccaaattgtggcaatttgcatgcatctagctctgctatacataattaacaccagagccctcaatattttttcttttgcaaagatggggattggatcaaatatatccaatggatgtttttaagcagtttaaatacagagcctgttagatcacttgctcattttgctaaaatatatttggggagagagaaggagcctttgaggattttaggctatggatggccccacattctcatctaaattgtcatgggaccattggctaaaattaaagcattttacccaagaaaattcttactctcctcccaagagaatatttgatttgcatctgctacagaattttcttttatccttgattatcatttcgggttttctgggtcctttagggctgttttaagctttgtgtggactgatagacaagatgtaatttaactcttagagaatcaacctatagcaaatttcagaggacaattcatgtgatcccttgattccattcctacccagtgcctgcccctgtgtgggaaagatttccaaagattcatcaaggaataatatataactttcttttgaattattttgcctgggttttttgagcttgaatcttcaaaaagaaattatttatataatgtatattatttagatactttgtagctgcaatttggcatgcaaaactatttttaagaggtataattttctaagtatattaaatagaaaatattcatttctagatacagcatttgtgcatgttaaaagctgtttactgaagaaaataaaattcataattctgtttatatggggtacctagaatgggcaaattcatagaggtaaaaacagaatagaatttactggaggtaaaagcaagagttgtttagtgagtacagaatttctgttggggaagacaaaaaagtttggggtttaggtagtggtgataggtacatagcattgtaattgcatttaatgccactggattgtacacttacaaatggttaagatgataaatatggcatgtatatatacaatgaaaacctgtaacttctaagaagatatatatatacacacatatattatacatacatacatgtatacatatacatgtgtacatgcatccataggcttcagattaaatttgcctcttctccctaatttattatagaatgccaagttaggtagggaaggaaaagtagattaatttggtcctgggaatttttttgtttttgaattttatttggcttaccactgagagtagaaactcaatttgaatgtgtgtgccactcttctttataattcagaaaatatttcactattttgtttatttgctataagggcaaggactctatgatttttttcattatggtacaaggatatttttaggactgaatagttatcagatgcagaggaaggtaatcttgaagctcaattcccaaattaaagtgttttgtatacaatttcttacatttttgcagtgttgaccttagggaattttctaagctcacctatttgatttcactgaaccataatataatgtgcagtttcttttcttgtaggccaagaagtggccacgtgaacagttgggatttgtttccataaaattcctctctagtcaaacaaacaggtcatagaataaactaaaaataaatttgtggaagtcagcattcatttatgactaacaaagaagagaaaaattccatgagaaatagcaagtgcagagctgcttccttaataaaaatctaccaatctatttcaaatttaaacccagccattaattaaaagggacacataaaatacattggcattaaaataacctcagaaaaaggaaacctgttatcacccctctctttgaacatcattcttgaagtgctagcccatgcagacaggggagaactgaataactgtgtatataagaaagaaaatgaaaaacttgtcatttttggatgatataattgtccactatggaagcccagaagagtcaacagcaacttagtactagtaagaggttggttacaattggaaattcatttataaaagtcaggtagataggcatgtcttctacctgcgggtctgggaatatatcagtgagggaggtggaacacaggttctagctgggtcttgggaaagtgaggaggaagcacgtggacaaggcagggctccagaggcaccagagggctcatggcttctctttgttctcgccaccactttcactggggcccaggagctgagttccaagacttggggaatagtggacttctggggcaaagtggctgatgcaccaaaacatcttttaaagaacagataaagaacagaagcgtacctgggagagctggctgaaaccaggacacggtgggaccattggaaaggactctaaaccacagcagcagaaggagagctagacttgcagggacccaggctccacactagggacctcgaccttgtcctgcagggagtggagacccatgaatggatgttaggtgggtttggtttgcacatagccttggtgtatgttgatagtgttgtaactgatgactaaccaggcctcacatttgcagcccacagtgccttgcatacaggagatcatcattcttctggtcctatgccatgtgattgttactgaggaggatggagatgacatcatctaccacgcctcctccccaggtgagggctgtggtgagatgcatcctgccagaccctcctcaggagacaagggtattggcagttattcgtgaatgatgcaatggtgccacctctgccacagactcagctgtctgcccctgccctcataccatgaccaggctgtgactacaggtgttagagctgtagagaactgggactgtgctctcccgactctcctaacgctgacaacagagggaggacccaggctgtcttgcatttcccagcagtggctattgggctaagtaagtctctgaagagagagcagggcaagcttctgtcatcccctagcccccaggagttttccaactgctgtggaagctgtgtatgaagcactctccccactttgtgtggctctggcagtcccacagcacacgactaaacatggccttgctcagaggtgacatttggtcagaaagttgtgggaatactacttaggttaattagagagaacttgcccgtgaaagtagcaggaatgtaaatcactttcctggtgaattagctctaggtccatgtgctcccatttaacagaagcgcttatttcaggaccatggtggtaggaagagtgagtgctgctataccctgagtccttactactgtgcagataatgccaggcctctttaactagagtgagttttgctaatttgaaaaatgacagtaaacagaattttaccattatgagtgattgtcaatgtttcaccaactctttattgacagatgaagctgctttggtggaaggtgctaaaaagctgggctttgtacagtgagaacaccatattcggtcatcatagaagcagtaagtggcaaacttgtgcacattttagaacagctactttcttgaagattgtgtattggacatagcatgtctattgcaagaatgatagctaaatgtttatttttctatctgtgaaaaaacagaactgttgaaaagttgttaatgtaattatattattagtgttatttgcattacaatacttgtttgctctttaagatgcttccccacacatctttttacattggtgtgaaaatattagtagcaaaaaacttcaaaagtctagttttcattctacaatagttggaaaattaattttttgttgcacataagggcatattctatgcctcttgtagcctcagcacctaagatttcttacacagtgaagcctcacagtcctctgggcttctgtctggctggctgagagagaaggggtcaaagcttaatatccctaatctatataggagggttcttcttcactaaagtaaagggaggtcatgtattttctgattttttttttttatttttgctccctatggttcagaggaagaaatttagtgatagaaaaaaggttatatcaagaataagatcaaatagggacccttgagatgggcaacagggtaaaatgatgatgaggacaagcagggcaggggagtttgtcatgatgaccagttagaagggctatagtgcattcgaagttcacttccaaggggtatattagcgtgatattgtttctgactgtttagtactgtagtcagtttttgcctttgcttctatgcaaaacctgtgaaatatcagaccttgtacaaattgcttatttcttagcatctgcagtttcctttcttatggagtacaaagatcagattatgtttatttttattgtaaccaacagagggaatttagcttagggaagtgtgcaaaaatagaacaaagtactgattgagtatagtatttcctttacagaagctttttaaaaatgaggcctttccctcttgcgtttgaggaggcttctaaccttaactggagaactttcaatcgcatgggtgcttgggtgctgcaacatttatctgcattgcaaaaatggaggttgggggtagtgggcagggactagtcaatcagaagtgggagagacagacaagaacagctgcttctgtctcactcacatgccaaagaaagacgagcatctacagagcctgttgataccatcctcttagtgttagatgccagactggtaccactttgttatttcattgaagttttttggtcatatttctgggagtaaaaaagaataccctattcattaggacttgcaaataatcataataaatataatcctattaaaccattaatactggggtgacgtggaaccacagattgtcaaattagataccaggtatttaccaggtattatgatgaccttgctggtcatcataagagctgagtccatgggtgcacgtggaggtggttgatgtaaccatcgtaccgagagatgtggctcctgggaatggaagccctgctgctagacagtggatattataacattcctcagcctgaggagaaagggaactggtggatccagagagagctgaataaagatgggtgaaggctggatgaagtagattattagttgtattttaggatgtagtgaggagtaaagcgttgtggagatgattattcagtcatgtacttggtcattcagatacattacttcactgattatttctctcaccccaagaggtgagtgctatcactattcatcagtaagtcaaacacttagtggaagaaactgaatttaaattcacatctactgggcttcaaaggctacattctttctactgtgatgtgttatggaaataccagattagattaaaaagtttgaaagcaggccaagtatggtggctcacacctgtaatgccagaaattgggaggcaggaggatcacttgaacccaggagttcaagaccagcctgggcaatgcagagagaccccatctctcaaaaaacaattttgacatagctgggtgtagtggtgcacacgtgtagtgccagctacctgagaggatcgcttgagcccaggtggttgatgctgctatgagatgtgattgcaccactgcactccagcctgggcaacagagtgagaccctgtctaaaaacaaaaacaaaaacctttagaaacagcatacacagcatctgggattttgtagatggaaagaaattgtgattcttgacttctaacttgaaagaacccaaagaagaagagcatttgattaattgccctaaaaccaggtgcagagttaccatctcttatctgcaccaagatccaaaagcctttgaattccaaaagttttgtcctaagtttggggaatagtcatttggcagcaaaatctaatcagaactgacatgaggctattataatctttatgaatctcactgcatgtgactttcatacaattttctgcaggaagtggatatgttatagcaagcagtgttaccccagaccgtgcagggggcattatgataaatggtctagaatgcgcatataactatataaaattggaaaatcctgaattcagaggcataactagccccaagatttctgatggacccatgcagctttgtgttctttatcttcatttcttggaggtagttacaccagccaattgttaagacagccatgtcactgaagaaaaatgagaagcttttatcagaagagcaagctatgaccccagaagacttgtcagaaaatagtacatgttgcaggaggctagagggtgggaaggggagagaaagcagaagagatgggggcagagagagatagaaagagagtgggtttatgagtgggagaaaattgctttgagattttaatacttacacttttaataggtaagagcctatttattttttcctttagatggtacaggaacagacactaggaatccttatagtcctggaattttctaggcctgtatctcttttatacacttaaaatatgttttaagtgtatgaaggagtttatgaaagtttaagtgtatgaaagtttttaaatatatctttttaaaagctttatctcagttcatttgtatgattgtatggcatgactcaatatagtacttaagtattaaatacagtaaacatctctccaaatcttcttctccttggaatttgagacttttattaaagaaaatgaagtaagttattttctttgttttagtcaacagaagtaaagtttcatgtgctccttttctttacacttctacagtttgatgttcttgcatcagcagctgcagagcagtctgaatagtttatacatgtgatgagagcattattttcattggcatttcccacgtcctatgaggtctttctcctagctccatctgagcgtgcctctggagatctgagaaagtgacaaatgatgacagatgagataaattcatctcattagaggcttggtccatgtaggacagttctactgcgcatgtgtgtaagcatttttccccagagcagttttgaaaattaagactcataaacatttgttaaattatcttattcccctaggatatttatactttgttataagaaaacgcatcttaatttttttttgtttttgcctctttaacactgaatggtcaatgctaaaaccaggttctgttgctatctgaattgcatcttttcctgttactaaagttaggggagtttttctgtaacgtttgttaaatgattcatgaattgcttgctctgtctgctttataagctattggataaatgtcggcactgcattcgcttgtaggaaataccttccagatctagtctttaggtttgcaagtgtgaactttggtgagacaacaacccttggggttacatatttaacgagagagattggggatggttgatgactgtgatagctcgtggagtgggtggtgatggtgctctgggtatggaggtgagggacgtgttaggcagccctccagacttttttatgcccatctcttgttggagactgtccattactttctagttgcattaactaggaccagcagttaatggacaagcaagaagggagttagataaaaatgggtgaatatggattaagatgtgaagatgaattttattattattattattattattattatttgagatggagttttgctctttttgcccaagctagagtgcaatggcacgatctccattcactgcaacctccacctcctaggttcaagcaattctcttgcctcagcctcccgagtagctgggattacaggcgcgtgccaacacgcccagctaattttttgtagaaacagggtctcaccatgttaccaggctggtctcgaattcctgacctcaggtgatctgcctgcctcagcctcccaaagtgctgggattacaagcataagccacctcacccagccgattaattttaaattatatgggagaataagaaagaacaggtcatttgtggttatagttgtggtcctatctctttttaattaatcttttacctgaagttacttaatcttttttttttttttttttttttttgagatggagactcactctgtcacccaggcttgagtgcagtgttgtcatctcggctcactacaacctcctcatcccaagttcaagtgattctcctgcctctgcctcatgagtagctgggattacaggctcctgccaccatgcccgcctactttttgtgtttttagtagacacggggtttcaccatgttggcgaggctggtcttgaacttctgacctcatgatccacctgctttggcctcccaaagcgctgggattacaggcatgaaccaccgtgcccagcctctcttaatcttgataacactcttttcaagcagttgctttacatattgagaaactaagacatgaatttgttttttttgttgttgttttttgttttttgatacggagcttcgctcttgttgcccagactagagtgcagtggcatgatcttggctcactgcaacctctgcctcttgggttcaagcaattctcttgcctcaggctcccaagtagctgggattacaggtatgcgccaccatgcccggctaattttgtgtttttagtagagatggggtttcaccatgttggtcaggttggtctcaaactcctggcctcaggtgatccacccacctcagcttcctaaagtactgggattatagacatgagccactatgcctggcctcacttaattttgataacactcttttcaagcagttgctttacatattgagaacctaagacatggatttgatatctttggtaagcgcacacaaccactaggtagttgagagagaatgcaggaatttatccagagctgaggagagactatcctcactcttaggcatttaaagttgattgggaaggaccaaactgaagatccacagagatgggtggtcagggctgctatagttgaggtgtgtctcagaatgataacatgttgacataggcatggattggaatgtacagaaaaggagaatggtgaggcttgtgtgtgcttgaagtctggaggttgcgcatggaaggatgagtgggagatgaaaggaggctgcacaagtgggtggatagcagtaagaagaatttatgggtgattgggactcacgaaagccttggtgggtgagggtggaccatgatgaaagatgtgtaaggaactatagatgctttggtgaggaaaggagagaggaagagtttattggtgctgaattgggaatgttctagaggtttgtaattttttttctacccagtttaaagatgaaacagtgaggaacttttgagtcaaatggatctatactgaatctcccagtttgctacctaaagatcaagttacttgataattcctagctaaaaaagtaaagaatacttttagagagtagatccagaagtcaatcacatacacagccagtgctagaattctctttttctttttttcctactgcaaatagctttgctagtatatttttgtggcaggggaataaataggtttatgtccattagatgtaaatgaaaagactaggagatacacagttacgttcaactttgaggaaaaaggtagggaaagatacagcttgactgtttttaggagtgtcaggccaccttttgtttttattggtgtttagctgtaggacacacattctatcaacagagcaatggtgacctttcattttttactctcccagtgacagaaaaaggatgtaattgttcaaagtctttcagtgcaactttaactccactgtaaaggggctgtaagtatcggtgcagtgtcctgcatagcagagagttcttggcaactactttgtcaatcagctccttttcctaactgtggttctcatcatttgcttattgtttgcccaaagttgaaaggttctttcaggtaggttgtcaagttgacttaggagtaaaagcccatggtggttcaaggcagaatggcacagatggtcagttttagccaatagttgtttcagaaacagcaactcaatgtgtcaggcaaaatccttggagtataaattctgattccagttttaccagcattgtgttgtgactttgggaagataaagaattttggttggcctgtgatgatcttctttaagtgctctgatatgtaaatatatgttctctagcagctattcttctcaattgttgtggttaattttttttttcatcaccaagagctatgttgtggggacaagggcagtgtccatctgtggctgcattattgctgctccttttggtcaggcttttcgtcctgtctgcttcctagtacccaaatctaaatgtattctctaagaaatctgtgaatcttatttttttttaattttatgtattccctaaggaatttgtgaatcttatttgttaaatcatgatcttatgtattgaggaaaataattattaagcttattttatttgactgtcaaaaatataaagctattctaggattactgattagttgaaaatcttagtaatcgttaccaattgtgggaagaacggtggtttcatatgagtacagtatgactagcggtttttaaaaatgaggaatacatgggaattctcagggcattatattttacccatgaaataattctatttttagtaatagctacttaaattaatttcatctaggttttgttctcacatgatctgtttcttaaactttttgtttatttaacattatattttatacatgaaataattatgttttgagtaatagctacttaaattaatttcgtctaggttttgttctcacgtgatctgtttcttaaactttttgttgatttgacatcaaattctaagtactacagaaagtacaaaaggcatcaatgtgaggcagtggagagaggaaggctgtaaatatagaacagtgtccatatgaaaacaccacagaggcatattctatttctatagaggtattttatttttacaggattttattttttccaaaattcaagctaggttcttctacttttttttattaaaaagcatcctaaaactatgtactttatagcatattggattatctgtggaatccagtaccctagccctgtctgtcatcatggaaatactcacagggcaatgagctgtgtacacccaaatgtttctgggcagaaatggattggctgcctactgggttgtgtcttacctgattaggagcttcttcagtatcagggagcaaagttgtacttgagcaatttaggatgtgcattttaccctttccacttctgcacaaaaatataaatgttgggatatgagttttacagagttgggtgcatgtaggcactgatgtttctctgatgactctcctggcaactttggctctccccagtgttgcttttgtttgacttttatgtacagaacagattttagtcttgtttggacacatctatacccaatttgttttccaaagctcatgcctgagcccaaccgaaggctgtattcctatttgaccactcagtattctcatggacactggaaaaacaataatacaaagccatgcgaagcatgctggctacaaggtttattgaaaggttttccagccacagtgtctctgtatttttataggatagtgtattttgtgagacacttttaaaagtgttaaaatacatggaggaaacattatgccatctggatattttgccacagaaggtaagtgaaatgtgaaaatgctatttttgaccattggagttgtactttctggcatgttggctggcttcacaggagcatattcttctactgcctgccccttttccctcccacctactcctcctgtgcccatggcagggactagatgtgtggccaaatccaaagtcaattacctgtatagccctccataactcatcaccagtagtgcagaaagaggaggcatcccatgcagaatcaactttagttactggtctctttcttagaaaactcaaacattgtcataactgtcataagaaaacagtgttttcttatccctctcttatgcttatgacattggttgatctatgacttgaacaaaaaattcatggaacccattgtgagcaggaaaggtgttatctgaaaggctttaaacaaccctgatgtcaggttttcctgccagtaatgatagctggagatatgctcagatgctggctgctttcttgccttagtgtgttccactgaatgcatgatgcatgcacttgtgaatacatgcagatacatgggtgtagctgcttgaaagactggatctttcatgggacagcacattaggctttttttttttttccaaacaaggtctcataatgtcatctaggctggagtacagtggtgtgattatggcttaccgtagcctcaaacctctgggctcaagcagttgtcccaccttaatctcccaagcagctaggatcacaggtacatgccaccaagactggttttttttaatatttattttgtagagaaggagtctccctatgttgcccaggctgctctcaaactcctgagctcaaggcacattgggcattatgttgctatgttgaaacatacttcctgcttcctcatattgatacctgcttactgtacatgtacacatggataatgcacaggtcctgtgtctctctgctgtggggaattaactcatgcaacttactgtgcactctccatcttgcggtagaagtggtttagttagaaaatgggagaactgtttttaaatatccctttggaactgtgtaaatgttgaattaaagtgtccttaaaaagcagtggtttctttaacttttgagcatgtgtgatgtcccctgtgaggtaaaacactctgcttgcttccattcaccagtggctgatttgcaggcttgtgcactctgtggcttacgctgttctctctgaggatgattatgaggagtggctgaaaggctatcaagaagccagcaacacattgaaaaatggagctcagtggttggaagagtgtggtcagatcattgagaagttaaccacacatgatagtctttacagatccaagaaggacttaagcagctaccgaacaaaatctttgaacaggcatccttctactatatagtgatgttttcttgttctgtttcttgttcttttcctattctcttgtcttgttctctgagacatttctttgtttgctttaagaagcacttaattttcatggctatctgaaatatctagccaccctcaactgagaatgacagcttaagaactctcaggccaaaaacagcatcagtgactttctggctttgcttaggattaggcttaatgagattagctcaccgctcaccgtgttgagttacatgaacaatcagaacgctgtgggctgattagacaatgtacacactaagcattctcacacttacttgtggtaataatatttaagttttgccattgctactctgtattgcctacttcattttgttgttgttgttgttatggtggctgtcttcactctatcccaaagcattaggtagctttctttttatgggagtccctcaagtctgagagctggatttcaactttttctgttttatgtcagcaaccattagaccatccattttccaatttctataactttgaagccatcacttgtttgcttttttcatttcttttttttattttttaattccttttagttttttatgctcagtttttatgtttcttattcaattgtttatattcagtcattttaatggaatttgggtaggaatagaactgaattcaagtgttcatttgccttgatttagtggaattatccaaaattacttttagaatctgaaaacagtgattatatatactgggtaatttacaaaaagaaagaggcttattggacttacagttccatgtggctgaggagacctcacaattgtggcagaaggtgaaaggcacatttcacatggcagcagacaagaaaagagagcttgtgcagggaaattccactttttaaaagcatcagataatgtgagacttattcgctatcatgagaacagcacaggaaagacctgcccccatgattcaattacctcccaccaactcactcccatgacatgtgagaattcaagatgagatttggatggggacacaatcaaaccatgtcaacattttacttgcaaattatatttgaaattatattaagttactatgttgctagtcattcacaaaacatttaaacaaattgcgatgccagaactcatatattgacatgcagtgacccctggaaatcagtagagaaatgtattagaaaaaaagttctggcaaagacctggctgattgttggccttattacacaacctcaggcattggtcacattagctcacagagctaagaaaaaccaagtactaaccttgttactcaagactttaggtactattgatttagatggataaaagatttattacaaagttatcctgaagaatatgtccctcatgcagaggacccaggaggttatgatgaccccagaaagcctgaccagcagtaacagtaaaagttacatagggacatgagtgcagaaatattatctctactgaaaataagttttatactagggaagagttacagggtatatgtagaactttagcacacgggctcaaaccagatgtataagttctatatggtttatgggttaacaatggtaaatccattatgcttatgagaagtgaattagcacaaatgattggaatagcaaataactccagggttcatgatgaattaattgctagagcacaaaataaccaagacctctctgacttatgatggggatgggtaacagcagtttggatgagacaatactcaaacatcattcccaggttaatctaaactaaaaaatggaagactttagaaggagtcattaaaatactcaagaatatggaagattattattaatgtctgatgggacagtactttatagaacacctgggaaatttcccatcaaaaatgactttttaaaaagtcaagtaatatatccaagataaatccaattactcacaatatacacataatataccataatgaggtgggaaattgaagaaaaataaaattgaaaagaaagagaaataagctttcctgtattaggctgacttgtcccagaggcacaaactggcacatcccagacccaagaaaagtcttgataatattatctaatgtactctggagactctcccagcactccctcaacatagggagaagaaaaattttcctttgttttagggtatgagtttatagattcttgttctctgtaaccagtaacttcaagtattctgttttatctaaaaagcacagcaaaggtcatgagaaggctgagcaggcctgaactacagctatctagacaccatagtgaaggttatgggataagcccgtgcctaggcaaacctagataatggacatctgggtttcatagcaacagttatgtgcaatcctgagttatgaacctgttacaatttgattaactgtctttgtcctgtctctgtatcctgctttcatgccactgtaagcttgcttcaagctagcctacccccttttgtgaagtgtgtataaaagtcaagtgctgtctttgtttcaggcccagtctttggatgtgagtctgctgggcctgagtgcactcaataagagattctcctgttttaacccgaggtatctcttgtcctcctaaatcctgcaacaatataagactgatttttgactgccgtaaaatctttcttgcctctaaaccaacacttcattctatagtttaatcttctttccactttttctgttctcttagcttaaggaaagattatggcaaactttgtatgtttttcatatgtacttgcaaaagattatacaattttgttttgattattcttactttaggctgaaacttccctaatcttcccttagagattgtggcatatcatgctagtttccttttcatatccaattgtttcttctgcatttatcaccctagctatgtgattatattttctgagcttccctgcagcttgttatagctatttgactaagccagtgatttgtaagcactgtgctatgtgtaccttctataaatccttcctccttcttctcttcatctaccaagcagtctggaatgaaaatacaatagctggacatcactagccctcctaggtaatgcaggcaggagtgaagggcaacacagtctattaacttatttactagaagataagtttcagaacaataagaatcttgtttatgttggtcaaagcaatatccccagcgctcacacaaagtgtatggcatgtgctaagggctcaggtatcaaatgggtattgaatgaatgaataaattaatagttcactctggagtcatgagtaaacaaggtctcagcttatttcacataatcaaactcctgatcaaatcacattactctatttttttatctttactgcctcagccttgccaatgttatagaaagataagattttttttaaatgtacatcaatattcctttccattaaaatgttttaaaagctgtttttataacagtgctttccaatattttcctgcttagcaagttcaaaattctaggacttcagacaatattattcttaacacagaatgcagccactggatcctgaggatttcactagatgttagttactgaaactgaactttcttgaattcttttccttccactgtggtctcccgcatttcaacatatcacctatacttgtcctcaaactttatttaaatttttcaacagaaataaattaaatattaatcattactcctgccctgttttttgaagtgatccttttcttcctatgataacaattcctctgggcccttttcatggccacttttatggttatagggtttgtaaatacattttttgcaaatgcatataattttattaattattttttactctacctccaaagttgttgctatttaactcttcgtgagaaaaattaaactcatgttttacttttgttatatacttatttatacttgagctccttgatttctgctcaaattgcttttcaagttacctgctttttagagaagacattatttggttttcattaggtgtatcaagcttttcttgataggtgtatcaacaagtgtagacttctctataaagaatttctttttccagagtagttttctgaaaagtctattaaaacagagaaaaatacaggtcttcgaaagagctcttcctaaacctcccctctaccagaaatatttctatagtcacatggtcctttctcccttcttgcttttgtctgagtccaaaactaatctctccttgatctggactgcatgcacttgtgccttctcagggcccttttgtgttttttcttctctcttgacttcaaaaatgaggtttctgtattggctgttaccctttaacatagaactatacccaccctttttaaaaatctcagaataaaaaggcttgctttaccatgtatctcctttactacctcatctctcttctcagcgaaatatttgggaagagaagccctcagtttgtgtcattgttttctcacctccagttcactttccccactgcctgacatccagctcactcatgcacatcccttgtcactaagttgccatagacaacgtttagctgtcctgccctcctggcaaaatttgactctgtgcattgggataatatgtattcagcacctattgaccaggcactgcgttaggtcctgctgttatagaaatgagaagcagacatcctctccattctgataagactcagtggagcagctattcctgattcatatgcaggtcgcttgacttggcctagcttttgcaagcttcacttaatgccatgtaaatctccctattctccaagtctttctttccgattccccttgctatacacaacttctcaaggcaattgtctccatgctcatggcttcagttgccttctctattctttgaggacaaaacaattataaatgttttcatttaatagctttattttatacaagatgcctcatttgctataaacatagattcaaagttgctccataaaagtaattgctaaaatatggtgacatttttagcatgtaaattttagggaatttccccaattactcttaatggtttgatttagtatgtgtattatttttgaaaatatatgttgggatgtcacaaatggacttagtctacagagatttatatccaactcttgactagagagctccattttaatgtgatgctgagactaaaaacctatcttttccttcttacctatttttcttcctacattctctgctaggagaaaggcaccactgtttccccagtcccccacaccagagccttagcagctctgttttccctgtatctcccctcttcttaacatataattaccaagcactacctattctatctcccaatgatcacaaaacttttccctttgctttaatcactgccactgcctttaacattactcttctttaagatgaagcctgttagttggtcctgttgtttcctgcaatcctttattattgttcagagtgaccacactgcacacacatctgacagtgatgcctcacctttgtatggttcaaagattctcatgttttcagaataaaattaaaaccaccccagcaccaaatttggaatcaaatagacctgggtttgtatcccaggttcatgcactgtccagaagtgtggtctcagaaaactgaactttctaagcctttgtttgcttatctgcctaaactctctgagagtggggactgtttcatatatacagtgcctggcacgtagaagggacttaattattattaagccaaaggataatttagagacacaaacaagaagacacacaaaatggagggtctaatgccagcctggaagaatgagatgagacagcaagaactgggcatttaggtagggaggaaagaaattgactgcaccctgtggggaaagactaaggggtgggaatgcaaggcagagccagtctttggtcctggtgcccagccctgggaaagctggctacaggccgatgtggaggatacctcccagggtaccctggggacagtgtcagccactgaatgaagaatgaaggggagacatttttaaatcgacatgaaaaaaatctttgttctttcaaaaattatacgaacctacaatatcacttcctctaaaagatcgacttccaccttcactttctgataatcaggctgggggaattggggaatatagactacctggaatcaaatcctggctacccctgagcagtcatgtgactttggggagcttacttacttcttcatctcaatttattctgtaaaatttgtaaaatgagattatttctgagggttaaatgagcataccacagttggaacactgtcaggcacatgctgtttgccagttgttgactattcatctttattgaattaggactatggtactctactttatggttctcaagtttgtatgagaaaatcatgcttagtgcattgataatcaaagaaacaaaatcagaaaaaccctgccatggaaggaagacacagaggggaaaaaagggagtgggctagtttcagtatttcagagcttgtggggacaagttagttccctattttataaacaaggaagtggaggcaggatgtgtcctgggatctcatgcaagatacacagtgataactccttactgagagtagaactagggtcccaggaattgctatggacaaagttctgacaaaaattaccccttggaagacaggaggagagggaggagagtgtttagatacaaaaacattcaacaatttaggcatatctaaattcagtgagcaaatgaaaaatgtactacttggcaaaacgaacttgctaatgggacccattctactaactgggacttcctgcagaacttatagaggaggatggcttcaactaacaaattggcctgtgctttcctcaggacctaaaagctcagaaagcctgtgatgaatgaaagcattagtcccaatagcactgcacaaggggccaggaaagcagcagcatcataaatgacagggtggggtagcccagtctgggacactgtgagctgtggggcagggcagcagctgggcagggcattgtgaactgtgggatagggcagccgggtggggcattgtgagccacatgcctgggatcccctgggtcagtgggcttcagtctggaggtgattgcagaaggaggagcagctccctttgttgtctcttcaggcagctgtagtgtctcttcagcatttgttgggttcacaacctatttaaaagccagctggtcttcaccctcccagacaagtcagctcaagggaggcggtggggtgcgggccttggcctgagccccacccaaggctgagctgtggggcagtcaggagagcagcaggcaagaccatctctgcaggcgcagtgaagccctggcctagagcagcaggtgtgagaggccaaacctgcaagctaaggcacaggtagtggcagagaggagtagaggccccccatggggaacacactgaactgttgtgtgtgccccaagtggggctggcaccggggtcgtgtgtggccctgtgagcctgagatctgtgaggcaataactgggaacacaacgccagtagcaccagtgcctgctgctgtatagcctactgaatttgcttttgaagctgttgagagcctccatgtacaccacatccatgaccaagagattccagaaggtaaggaggtgatggatgccatctgctcttggcacacctttggctgccactgtccccagggtcccctgggaggtatcctctacataggtctccttcatgcctgtagccagctttcccagggctgggcaccaggcacaaagactggctctgccttgtattcccaccccttagtctttccccacagggtccagtgaatttttttcctctctacctaaatgcctagttcttgctgtctcatctcattcttccaggctggcattggaccctccactttgtgcctcttcctgcttgtgtctctatttattatcctttggcataagaagcattatttgaggcttttttttttggtatattctctcctgcttctaaataatatctcaaataccccagcattccagtacctatccattctctctctttacctatccagatggtgcctaagtaaaggaaccaggtaagtgcccaagtgttcccttccttccatttattagcgtatggaagaaataatactaatactaatactcaggacaattcatacccaaatattttggaatttcttatttaaattcaaaatagaggttgccatggtattcttaataggttgttttaagtcaccttgatagaagctgctaattccttctaactataatttgaacacagaaggaaagaaaatggagcgtgcttaaaataattgggaaagatgtgaagtgctactgccagggctgcagaaaaattaacgtgttttccccccaaaggaatttacccatgaagttctgtttactttaaaattcccagtttacactgggcagggtggcttaggcctgtaatccgagcactttgggaggcctaggcaggtggatcacctgaggtccagagtttgagaccagcctggccaacatgacaaaaccacgtctctactaaaaataaataaataaataaatattagccaggcatggtggtgagcccctgtaatcccagctacttgggaggctgaggcaggagaatcgcttgaacccgggaggcagaggttccagggagccaagatgtgccattggactctagcctgggagacagagcgagactccgtctcgaaaaaaaaaaagaaagaaagaaaattcccagtttaacacaaaatgggtctccacatttattttggtgacttaacagacttcatttacctccttgttctaaaagagaagtggggcggttcatgatcaaaagcttcaaagagatgaaacataagtttggacttcaatttgtaatgtaaagattggaagtcaaaatgccagaccttaactatgcaagagtgtttgttgccatggttcctctttccccctcctgccagtagcatcttgttcaaagataagagagtaggagttcttcagactttaaacttctgggagaggcagggggatgggaagaggtagaaaagaggaaacatttaaaattttgcctctaaaattttggaaagagataaatctaggtaaaaataattctggataacaatatgtcttgaataaaaagtaaatcttccaaaatagaaaacactgtattgtaaagatatttaaatccagttggttcattggtttcatttaaatgtcagagatttcattaatttagaggaaatgtcttgtagctcttctataaaaactttggttgggctcttaagtttttaaaaaggtagaataattaagactcatgatgaatgtgactttgtaactgggatgtactatactcacttttcaggatatttcagaattgtcttagaataaataaatacgttatatgaattaattgattatacctttatccacaaagcacgtaagtacttgtgtaaacttctgctttgcttgaaagtgtaaggtaagactctgagtgattttatacatgagttagtagacgagtagttttggatgacagcccaaaatagactctttattgtcattcttcaggatttacaacacttttttcacttttttttttttttttttttttgagacggagtctcactttgttgccaggctggagtgcagtggtgcgatctcggctcactgcaacctccacctcctgggttcaagcgattctcctgcctcggccttctgagtagctgggactacaggcgcatgccaacaaacccagctaatttttgtatttttagtagagacagggtttcaccatgttggccaggatggtctcaatctcttgacctcgtgatctgtccaccttggcctcccaaagggctgggattacaggcgtgagccaccttgctcggcctacaacacattttatgtatgtctcatttggcccctccaaatacagataaggcctctgtatgttctccctatattgctaatgaagaaacaaaaagagatcttaaatgactagtaaaacagctactaaacagaactaaggtttgtaagtcctcagaatgacatggaaatgatagatatgctgaatttagttctttaaagtttttaaaactccagaatacatcttatattttactgtaaagtagacctgtcttttaaaatgatttttaaatgatttttaaaattatttattccatttaaagttcattttacacaactcaaaggcaacatttacctcttcatttttttctaaataaaggagagtctgactacgttacccatgctggcctcaaattgctggcctgggctcaatagacttttccaccacagcctcctgagctgctgggactacaggcatctgccatcttgcctggccctatctcatgtctatacatttatttcaatggataagaataaaagtagaggtagtgaaatagctcaggtttgtcattcaaataaacaagttgataaattctaaagaatttctcttggttactgtgaattgaagctgagagtgtgtgggacaggagaaggtggcaagaggcaggtaaggaaccaggcattaagcatagggtgataaggagtgttacagcagaatagctttaaaaaaagtttgtgagcacagaatttctcattttgtgttgattaccatgaccattaaatttttatttcaatttgtctttttaattgtatttgtgtggaattcaataaaacaataagcaaaatctcaatttcatcatttgcctattaacttttcataggaacacagcaaagcaccaaatgataaaagtatagacacattgaaagtttgcttctaaaatctttatttgagacaattttatattggtactcctggaaactgagaaatttctacttagatgtgaaacattttggttttttttcaatgaggaattaaattatttcggttgtttagaaaaaattagacacaagttatgctttacttttgtcttctctcctgaaacatttcagaagaacgagatttatttaaggcatttcagaaagctgtttctaagaacctggaatagatttcagattactcaaaagtgttttttactaccttaccttcatttagcagcctagctaatgtaactcaaggtagtaactgtaacacaaagtaaggtactgtgatcttattatccagtttcactgttactcaccaatttttcatgcagccttttatgttctgactttagaagctttactaatttgggaggtaaaggtgctctccagtgacccatttctttcccctaccctagcggtgagggaaggaaagaatggacaatatgaagtgaaaaagcctctgagcaacagacttgtcctcttttcagtagctattttaagccctcctttccaatgtgtttaatggaaaacatacagaaaatacagaaaagtaatttgttctactcagaatactcaaagctaatattcattatgattctgatattgattctttcttaatctttatgcatgtgaatataacatttcttcaaaaacaagattactgtatatgtgctgcttcctaacttttacctaacacagtgaaataatgacataagttcctgaaacagtgcttgacatctagagagcactccaggatgtctttccatgcctgtgcacctgcaccctgttctacctcatgccttctaatagaatattggtataccatggactggttggagcattacttatttacttgtcatttatgactgtatatcttttatagtaacatcatacacagttccattttgtttgatcatgcggacacagataaaaaatgtactttgataactgatgcattgtacctccctataaaattcagatggtatatttttgtctcagaacataaatcaatgggatgagtcattttgtagttagggtagtttagtattaaatgttcctttgccaaactgaagttaaccattgactattcactggatattagcatttctcattaaagtttttgtgattcttggtagctcttttgcagttcctggcagttctgaatagctgcccctttaagagttctgatgctgtcttagatgaccaatcaggagacagcactagaagaaatcttagaagatgtgggaaaactgggagaacttaactagttttaggtatactgaaacatatgtaatgagcatatgtgttccagatgcagggcaaatggtactacacaagacagactgcccatcctaactctgaaccttacattctagagggagctagggatcaatagcacttgaataatcaagaatgtgaggtggtgaaatgtttagaagaaagtaaaacagagcaatggattgaagaggagggcagttttacagtagggaaggaggcagaagttggctgctttccttaggtgacatgcgagcagttctaaaagtgaggggaaacttgtgaggatgtggagagcttccacacagaggaatagctgcttttgagttccttaaatggaagcaaacttggtttgaccaaaggacaaaaaaacacaagggtggctgcagcagattgaaagacaggccaggtggttaagaccttacagaaagacacaaggatggctgcagcagagtgaaaggcagaccaggtgggttaagaccttgtatgcaatatgagccttgacaaagattatagactttgtgatgagaagccattggaggaatatagcccagggaatactgatagttctttaagaaaaagatcagattagctgctctgtgagaatatgctgggatgcaggtgagggtggaaggaggcagaccagctaggaagctgatggagtggttcagatgagactcaacagtgaacagaaaaataagaaggacctgaaataggctgacttgaagaaattaagtgaatccggaagtaggtaacaaagtgatcaatagacaagtcacaaaaaaatgcagataatctttaaacacatcttaacacataagagaaatgcaaatgaaaactatgctgcagtttctctcttattgggagaaatttcaaaaactttccaatacattctttggtatggctgtgaaggaagttgtgtccatatgttgctggtggaaatgcaaagtggctcagctccataaagaaaactttgacataatcttacagcattgcaaatgcatttatttatttattttattatactttaagttcaagggtacatgtgcccatatgcaggtttgatacataggtatacatgtaccatgttgctttgctgcacccatcaactcgtcatttactttaggtatttctcctaatgctatccctctcccaggcccccaccccgcaacaggccctggtgtgtgatgttccccatcctgtgtccaagtgttctcattgttcaattcccacctatgagtgagaacatgcggtgttcggttttttgtccttgcaatagtttgctgagaatgatggtttccagcttcgtccatgtccctacaaaggacatgaactcatccttttttatggctgcataatatttcatggtgtatatgtaccatattttcttaattcaatctagtattgatggacatttgggttggttccaagtctttgctattgtgaatagtgctgcaataaacatatgtgtgcatgtgtttttatagtagaatgatttataatcctttgggtatatacccagtaatgggattgcagggccaaatggtatttctagttctagatccttgaggaattgccacactgtcttccacaatggttgaactggtttacagtcccaccaacagtataaaagtgttcctatttctccgcatcctctccagcatctgttgtttcctgaatttttaatgatcaccattctaactggcatgagatggtatctcgtggttttgagttgcatttctcagatgaccagtgatgatgagcattttttcatgtgtctgttggctgcataaacgtcttcttttgagaaatgtctgtttatatcctttgcccactttttgatggggtcgtttgtttttttcttgtaaatttgtttaagttctttgtagattctggatattagccctttgccagatgggtagattgcaaaaattttctcctattctgtaggttgcctgttcactctgatggtagtttcttttgctgtgcagaagctctttagtttaattagatcccatttgtcaattttggcttttgttgccattgcttttggtgttttagtcatgaagtccttgcccatgcctatgtcctgaatggtattgcctaggttttcttctagggtttttatggttttaggtctaacatttaagtctttaatccatcttgaattaacttttgtgtaaggtgtaaggaagggatccagtttcagttttctgcatatggctagccagttttcccagcaccacttattaaatagggaatcctttccccatttctcgtttttgtcaggtttgtcaaaaatcagatgactgtagatgtgtggtgttatttctgaggcctctgttctgttccattggtctatatatctgttttggtaccagtaccatgctgttttggttactgtagccttgtagtatagcttaaagccaggtagtgtgatgcctccagctttattctttttgcttaggattgtcttggcaatgcaggctcttttttggttccatatgaactttaaagtagttttttccaattctgtaaagaaagtcattggtagcttgatggggatggcattgaatctataaattactttgggcagtatggccattttcactatattgatttttcctatccatgagcatggattgttcttctgttgcaggaagtcagggaccccgaacggagggacaggctggagccgtggcagaacaacataaattgtgaagatttcatcttaatatggaagtttatcagttccgaaataatacttttataatttcttatgcctgtctgtactttaatctcttaatcctgttatctttgtaagttgaagatgtatgtcacctcaggaccactgtgataattgtgttaactgtaaaaactgattgtaaaacgtgtgtttgctgtagtcccagctactcaggaggctgaggcaggagaatggcgtcaacccaggaggcggagcttgcagtgagccaggatcgcaccactgcactctagcctgggcaacagagcaagactccgtctcaaaaaaaaaaaaacaaaaaaaaaaaccatgtgtgtttgaataatatgaaatcagtgcaccttgaaaaagaacagaataacagtgatttttatggaaaaagggaagacaaccataaggtctgactgcctgtggggtcgggcaaaaacagccatatttttcttcttgcagagagcctataaatggacgtgcaagtaggaaacatattgctaaattctttcctagcaaggaatattaatattaataccctgggaaaggaatgcattctgaggggaggtctataaatggccgctctgggaatgtctatgttgtgcagttgagataaggactgagatacgccctggtctcctgcagaacgctcaggcttactagggctgggaaaactctgccctggtaaatttgtgatcagaccagttctctgctctcgaaccctgttttatgttgtttaagatgtttatcaagacaatacatgcaccactgaacacagacccttatcagtggttctccttttgccctttgtcctgttccttcagaagcatgtgatctttgttggacccttatcagtggttctgctttttgcgtgttgaagaatgtgatctttgtacctactccctgttcttacaccccctacccttttgaaacccttaataaaaacttgctggtctgagactcaggtaggcatcatggtcctaccaatatgtgatgtcacccctggcagcccagctgtaaaattcctctctttgtactgtctctctttatttctcagccagtcaacacttacagagaatagaaaggacctatgttaaaatattgggggtaggttcccccagtattcttccatttgtttgtgtactcttttatttcattgagcagtggtttgtagttctccttgaagaggtccttcacttcctttgtaagttggattcctaggtattttattctctttgtagcaattgtgaatgggagttcactaatgatttggctctctgtttgtctgttattggtgtataggaatgcttgtgatttttgcacattgattttgtatcctgagactttgctgaagctgcttatcagctcaaggagattttgggttgagataatgaggttttctaaatatataatcatgtcatctgcaaacagggacaatttgacttcctcttttcctaattgaataccctttatttctttctcttgcctgattgccctggccagaatttccaacactgtgttgaataggaatggtgagagagagcatccttgtcttgtgttgattttcaaagggaatgcttccagtttttgcctattcagtatgatattggctgtgggtttgtcataaatacctcttattattttgagatatgttccatcaatatctcgtttattgagagttcttagcatgaagggctattgaattttgtcaaaggccttttctggatctattgggataatcatatgttttttgtcattggttctgtttatgtgatggattacgtttattgatttgcataagttgaaccagccttgcatcccagggaagaagccaacttgatcgtggtggataagctttttgatgtgctgctggatttggtttgccagtattttattgaggattttcacatccatgttcatcagggatattggtgtgaaattctctttttctgttgtgtctctgccaggctttggtatcaggacgatgctggcctcatgagttacggaggactgcctccttttctattgattggaatagtttcagaaggaatggtaccacctcctctttgtacctacggtagaattcagctgtaaatccatatggtcctggactatttttattggtagactattaattattgcctcaatttcagagcctgttattggtctattcagagattcaatttcttcctggtttagtcttgggagggtgtatgtgtcgagaaatttatccatttcttctagattttttagtttgtttgtgtagaggtgtttctagtattctctgatggcagtttgtatttctgtgggatcagtggtcatatcccctttatcattttttattgcgtctattttattcttctctcttttcttctttactagtcttgctagtggtctattaattttgttgatcttttcaaaaaaccagctcctagattcattgattttttcaagggtttttcatgtgtctatctctttcagttctcccctgatcttagttatttcttgccttctgctagcttatgaatttgtttgctcttgcttctctagttcttgatgttagggtgtcgattttagagctttcctgctttctcttgtggggatttagtgctataaatttccctctacacactgctttaaacatgtccctgatattctggtacattgtgtctctgttctcattggtttcaaagaacatctttatttctgccttcattttgttatttactcagtagtcactcaggagcagtttcttcagtttccatgtagttgtgcagttttgagtgagtttctcaatcctgagttctaatttgattgcactgtggtgtgaaagacagtttgttgtgacttctgttcttttacatttgctgaggaatgctttacttccaattatcaggtcaattttagaataagtgccatgtggtgctcaggatgtatattctgttgattttgggtggaaagttctgtagatgtctgttaggtctgcttggtgcagagccgagttcaattcctggatatccttgttaaccttctgtcttgttgatctgtctaatattgacagtgggcttttaaagtctcccattataattgtgtgggagtctaagtctctttgtaggtctctaaggacttgctttatgaatctgggtgctcctgtattgggtgcatatataggatagttagctcttcttgttgaattgatccctttaccattatgtaatggccttctttgtctcttttaatctttgttggtttaaagtctgttttatcagagactaggattgcaaccgctgctttttttgttttccatttccttggtagattttcctccatccctttattttaatcctttgtgtgtctctgcacatgagatgggtttcctggatacagcacactgatgggtcttgactctttatccaatttgccagtctgtgtcttttaattggggcttttagcctatttacatttaaggttaatattgttatgtgtgaatttgttcctgtcattatgatgttagctggtttattttgcatcattagttgatgcagtttcttcatagcatgaatggtctttacaattggcatgtttttgtggtagctggtactggttaattctttccatgtttagtgctttcttcaggagctcttgtaaggcaggctggatggtgacaatctctctcagcatttgcttgtctgtaaaggattttatttctccttcacttatgaagcttagtttggctggatatgaaattctgggttgaaaattcttttctttaagaatgttgaatattggcccccactcccttctggcttgtagaatttctgctgagagttcagctgttagtctgatgggcttccctttgtgggtaacctgacctttctctctggctgcccttaacattttttccttcatttcaactttggtgaatctggcaattatgtgtcttggagttgctcttctcgaagagtatctttgtggtgttttctgtatttcctgaatttgaatgttggcctgccttgctaggttggggaagttctcatggatgatatcctgaagaatgttttccagcttggttccttctccctgtcactttcaggtacaccaatcaaacatagatttggtctcttcacatagtcccatatttcttgaaggctttgttcatttctttttactcttttttctctaaccttgtcttctctctttatttcattaatttgatcttcagtcactgatacccttccatcctcttgatcgaattggctattggagcttgtgcatgcatcactaagttctcataccatagttttcgaccccatcaggtcatttaaggtcttctctacacttagccatttgtctaaccttttttcaaggtttttagcttccttgcaatgggtttgaacatgctcctttagctcagagtagtttgttattaccaatcttctgaagcctacttccatcaattcatcaaagtcattctccatccagctttgtcccattgctggcaaggagcagcaatcttttggaagataagaggcactctggtttttagaattttcagcttttctgttctggtttctccccatctttgtggttttatcttcctttggtgtttgacgctggtgacctacaggtagggttttggtgtagatgtcctttttgtttatgttggtgctattcctttctctgtgttagttttccttctaatagtcagttccctcagctgcaggtctgttggagtttgctggaggtccactccagaccctgtttgtctgggtatcaccagtggaggctgcagaacaacaaatattgcagagcagcaaatattgctgcctaatccttcctctggaagctttgtctcagaggggcacctggctgtatgaggtgtcggtcagcccctactgggaggggtctccaagttaggctacacaggggtcagagacccacttgaggaggcagtctgtctgttctcagagcacaaacgtcgtgctgggagaaccactgctctcttcagaactgtcagacagagacgtttaagcctgcagaagctgtctgctgccttttgttcagctatgccctgcccacagaggtggagtctatagaggcagtaggccttactgagctgaagtgggctccacccagttcaagcttccagccactttatttacctactcaagcctcagcaatggcggatgccccttccccagccgcgctgctgcctcacagttcgatctcagactgctgtgctagcagtgagcaaggctccgtgggtgtgggacccaccaagccaggcatgggagagaatctccttgtctgccagttgctaagaccttgggaaaagcacagtatttgggcaggagtgtcccatttttccaggtacagtctgtcatggcttcccttggcttggaaagggaaataccctggccccttgagcttcctgggtgaggtgatgccccgccctgctttggcccgccctccgtgagctgcacccactgtccaaccagtgccaatgagatgaaccaggtacctcagttggaaatgcagaaatcacccatattctgcgtcgatcacgctgggagctacagcccagagctgttcctatttgaccatcttggaacagatcccctgtaaatgcatttaatccagaaattctactgtgaataatttttcctgaaggtgtatccatgaatataaaataacataaacacaaaatttttgttctattattttcaatagcaaaatattggaaataactcaaatgtctagaaagggactgataaaataaagtgatacaacaatgcaaaggagaactatggagttgtaaaaggaatgaaatctctctttactgctgtggagtgatttccaggttatattatgtaaaaaaaaaagcaatgaggggctgggtgcagtggctcacacctgtaatcctgcactttgggaggccaaggtgggcagatcatgaggttaggagatcgagaccatcatggctaacatagtgaaacctcatctctactaaaaatacaaaaaattagccagacctggtggcaggcacctgtagtcccagctacttgggaggctgaggcaggagaatggcgtgaacccgataggtggagcttgcagtgagctgagattgcaccactgcagtccagcctgggcaacagagtaagactccatctcaaaaaaaaaaaaaaaaaaagcaaggaggagaatgtacagtaatatacataaaagaaagcaggggaaacatgtatttgcttactgtaaaaaaaaaaaaaacaacactggaagggattcttgatgatgatgtgtgacagtttttcccttaacttcagtgggtagacaaagtgcatatttgctcaagatgttattttggcattggttttccagtgaatgctaaccatttattttttgcttttgagttaatttgtgaaagcttttctttgtaatttattgtttattttttagcatatagattgctcttgcatttcatttgatcctcataatattttgaatttgttgatataagaattatacttgttttacatgtgaggacaaggcctctgagaagtacaaattaggtttttcaaggtttggatatataagacttggtaaactgagagtgtaaattctacataagactagaatttatagaatgattcatgagtttatttgaataccctttttattttactttcttaaagtttattaaagtaattaggctttagagttaaaactgtaatagtcagtggtgagaaatgaaaaggaggtacttataacccagaagtgttcttcttcttttaaagacagattattgctctcactcaggctggagtgcagtggcacgattgtagctcactgcagccttgaactcctgggctcaagcaattctcccacctcagagcatctgaagtagctatgactataagcgtgtaccactatgcctggctaattttcaaaatatgttttatagagatgagggtctcactgtgttgtcctgcctggtctcaaactcctggtgtcaagcaattctcccacattaacctcccaaagtgttgggattagaggcatgagtcaccacagctggctcagaaatgttcttaaaagcctaagaagtagagttaagtgctcttaagacatatataggccaggcgcagtggctcacgcctgtaatcccagcactttaggaggccgaggtgggtggatcacgaggtcaggagatcaagaccatcctggctaacaaggtgaaaccccatctctactaaaaatacaaaaaattagccaggcgtggtggagggcgcctgtagtcccagctactcgggaggctgaggcagaagaatggcatgaacctgggaggtggagcttgcagtgagctgagatcacgccactgcactccagcatgggtgacagtgcaagactctgtcaaaaaaaaaaaaaaaagaaacatataaagggggaagtatactacctaatgtgaaatgtcacagctcagtcacagtcactaaaacagatcgaggagttaaaaagttatggcaagactgagaactgacatggaggaacagcagtggttaggaagcccaaggtggggttgtccgacctgggaaagcagaaccaaggcatgagtgagcctgagatgggcacaaaggagctccacgtgtgccctcaggtgatacaggcaggccagctcaaggctatcaggtaggtagcatctgatatgtgaaaagtctggccttagataaaatctcaaactgcatcataattgagagacttggaatgtttttatgggccataaaactaataccaggtacagtatagggatgatagagcaggtcagtaaatgcagtaagtctttacataaacagatgctcagcagtgggctcagaaagtgttgacgtattttatttaattgggatatatgaaaataatatgttgaaattaatctctttctctgaatatgctccttctgtcagttaattccttcattactgccctctcccttttaatattttgacaggaaaaattatttcttgcataattttacaagttttacgtaagtttacagttgcataactttaatacctttggcctttaataatgcatcttacttattctaaattgcatacattgttttgttacatttttaacatctttacaattgagatagatcttacgactaatagaatcttagagaaaaaccggtattcagtgtcagcgagtctacagattccttcctctgagggatgtttacatttagacctgagcataactgttttttaagtcatacgtttccccatcattcttttatgctgccagatcacgttgtaacttaaattgataatacaaaaacactgggtcttaaaatacagtgatagttataacccctaatcatgagatcaaaattattttcctagtttcctagtttcaaacattttaggaggttacaaaaataattttgaaggtattcacatcaagttgtgtagttattgtgtttttatcctctggatgtctctaaatctccacaggtgcctgtttatggggcctaatattttatttaatagttggcagtcttttgtgacaatgaaaaaagagtagtgtgatttctcgactctccttaggctcttgggaaaagagttaatggagaatgaagaaataacagtgtatgtgtttaagtttctgtctaatggcttaagtgtccattctataaaatagcaatatgtggtatttgtcatcagcagaaattacaagttatatagaaaattgtggtaggctatagacataaaatgaatattttctgaaaaccccatgcaaataaacactagtaaattcctagtgaattcagtacatacagtatgtacaaatgatatgaaactcatcaaagtggaaataacattgttaactatggaaaaatggtcaaagtgtataatctaataaacaaatataagttagagcctcaatagtgttcctccttcacatcagtaggaatttttttaagtatccaaagctgaactagaagctaaaactggtgtgatttgaagcactgtgccctaatatgcccatatcttctttagaaagcaacttagcactatatattgattcatgaaaacaatctcacctttgttctagtcattccacttttgaaaatctttccaaaggatctctaagaaaaagtacaagatactatacatgaaggttttcctcataagaacaaaactttgtaaatgcctaaatcaccgacaatagggcattggctaagtaaagtataggaataacacttgatgagccaatattttccaaaggggtcaaggtcatttgtaagaaaataaaacataaatggtgtactgcttagagctatttttttaccatgcataaggaaaacaaaaagtaatggttgtgagttttaaacaaggcattattttggctcttgcaaatttctgttcttgataagacatttcttaaagaagtaagcaagagacttttacctattcctgcctttagtgtaatcatcagtactatcagcagtgctgactaaccaagtctcttacaattgccagttgaagaaaatctacctcaaaatagttaaaaatgtttattgaaaaattaacttgcatagccagggagttaacaggagtcagtgaggcactgcttgaccaaggaatcaaatgatatccccagaacctatctcagttatgctcttctctgttgatctctcctgaaaatacccttctcttgatggtaatgggagccactggcaactcctggtcagctaccagtcctgtgagccagttcatcctttctcctctagttcttgggaagtcccagatgaactgcgattgactggccaacctctcggtcagatgcctaaaaccccaggaatgggagagtgacagcttgttacttgggctgatcttgttttatttcctgtatgttttcatttcttcttgatttttgtattgaaatacacaatagcacatcttggttttatgtgtggggtatatgtgtatgggcgtaagcctgctactttttgaatcttgtacataattttcctgggcttccatggaaaattccaaattaaacattatgacacaggtactgaaacattatatgagttctgcaaacattacttgttatgtttcacactcaaatgataatatatttgcttttttgatacaaagtagtcatggactttttcagaagctttaggttagggacggctatacaagtctcttcctgtcatgttgtgcacaaacaattttatttttccacatagctaacattatatcatcaaattttcaaatatgtgggaaaaaacttgaaaatgacttttgtgtaagttttttacataacaatagttttctcccagtaaacttcaaatcatggagaaaaagcagattttttagctatgtaatattctagtgagatggcagtattattaaaatagatgattcggatttctgctaaatcagaaactcctaaattatttttatactagattctaaccactttagttggagggaagaaaaggatcctgggtagataaatttgtgaaatgctgagttggacattattcactaacgggctgattagtttttactgtaccactgtgcactttgattttgtaaaagcaagggatagagtggattgtgatttgcccactaaaaccctttttaaaaagtagaacagttactaatatgtgatttggaaaatattgccttaattattactctgagtggatcttcacctagtttcttacaagattgcttaagataagtgggttgagatggacagtgctgaggagtgtcataggtttttattgttttcccttattacaccttttattatatgatgaaaatgtgtaataaaaattcaagaatattatttttagtcttgcttaaatggattatctcactttggtgcaaggtggactgtaaacagacctaccttgacatacatagggccaacattttttagaagaaggtctaagtaagatctgtttcaaaagtattcttgatgaagtcccaaatgaatcatgtgttggaaagaagtgagattttagctttggaaatggagggcaaaagttaaaaatcattttctgacatgaaagtgtccttatagattagagcattgaaatttttatgcagtccacttaaatctgccatgatgaattgcccctgaataaatcacagataagtaaatgaattagccatgttattttctgagggatagtggccaaaaaacagctctttattttagcatgtttgatatattgagctaatgtctgacagtaatttcacacagcatcagttgctgcttgagcctattcctaaaatgtgctgcgaatatcagtagagaggcaagtgattatatttttatttgataagtagaagtggtagatgcaggaggcagatgagggggagggtgtccggagaatctgtgacctgcctgtgcactgggagaatggggtggggtcacgggaagtttgcatcttgtgcagtggggaggagcctggcctcttcagcttgtgtgtggtggcctggtattcagtctgtgagttgggagcccgctggaaggatcccctctcgcttttctgagattttttgttcctttttgccaaataaattctgttctactcacccttcaatgtgtccttgagactaatctttcttggtcgtgtgacaagaacctggttttagctgaactaaggagcagagttttgcagcagaaggagcagggcatgtatatgacttctcttttgcattagattatttagttttagtctttttgaaagtccttgacatagcccagttttattccatatgtatacagagaggctataattttgcattcccaagtagaattattatatttttgcctttatttccttcatatttattactagaaacttttttcaggactatttaaaatgattgaaatgaatgtgtagctactttaaaaatcattttttctattcgcataaattatcacatttttttttctctgtagatagagctttggagccaaacccttctgatgatccaagggcaagcacagtcttcttgcaaaaatctcaaacagatggtgagacgacactgttttttccaccaagaagacgactgaaaactctctgtcataatgagtgtattatagaaagcatttagagaaacttacattggtttaaaattttcaacttttcatatattcacttgtcctattttaatgtgtgaaatacttctctttagttgttactgtgtgagtgaaaacatgtaaactttctgtttatacattttgctaccttttggcaacaccatttgtcatgtgatttaagagtagtcatagatttatctttattcataattttttattcatattttttgtctttcgccctttttcccttgctccaaagagttcattttaatgatgaatgatagaatttaggcttcagcttgatctttatttaaacaaataaaaaaaccatttgttcatcaatggggattgaatttgtgatttcagcctcctcttatacagtgctttaaccatatgagcttatcacatccaagtttatgctactcaaaacttttaagctattaaacttttcctgctaatgtaatataaatttaaacatccagtactcctgcttatattttaaatgttatggtaaatcctagtttatttgattaaaaagccatatacaaccaagttttttagttgatttcaacagcaagaatataaatgagggttctataataatatttgaagtaatgcagtacaataaaatttgggtttctaattgtgcttttatggtttgtgtggattttgcctgccttaagtcagtcatctctggtcaggacttgtgtttgttcatttttgcattgctataaagaaatacctgagtctgggtaatttattttttaaaaaagtttaattgggtcctagttccgcaggctttatgaacatagcttcaacacctgcttctgctgagggcctcagcaagcttacaatcataatggaaggcaaagggagagcaggtggtttcacatgagagagggagcaagagagaggggaagggggaaggtgccacactcttaactagctcttatgtaaattaccagaatgagaatttgctcattattgtgaggatggcaccaagccattcataaggaatccactgccattaccccaacacctcccaggaggccctgtctccaacattgagggtcacattctcatatgacatctggagggggcgaaatatctaaaccatataagaattgtatttctcagttccttccagagccatgggcttctcacagagtgtgtggaagccctgaaggctatttcctgtccctcaagtcttcagtggtaggaatgtttgcctttaaggccttccagcatcaaaggaggaggcagtgtaggaaacaaagcatggcccaagtccctcttggagcttttattattctggcctttgttagaaaaaaaaaatgattttgtttgctgcagatactatgtccaattaagtttgcatactcattttaaaatttaaatgtaagataggttactttccagttgtgcaaagacacattttttttgttagtgacatattagtagatgaccaataagtggtttgagatgcttacagggattctggtgcatctacagatttgtaccttgccaggaactagttcttagagctgctagctcttagattctagtaattaaagtaagccatgtgtaaacacagagtgagaaaataccaatgaatcatggctcatatatgcaacagttgttaaacttatttattagctaaatttctcatctggcttaatttgttatgcccctttttttgtacatgagcattctttcatttgactgtaatagaatagatgatagatgatagatagatagatagatagatagatagatagatagatagatattttttttaccccgagatggagtcttgctctgtcgcccacagctggagtgcaatggtgcgatcttggctcactgcaacctccgcctcctgattcaagtcattctcctgcctcagcctctcaagtagctgggataacaggtgcatgccaccatgcctggttatgaatgtaatagaatatctgttaggacaaaaagtaaagccaaatttttagattttactttataagatttattaggccctataatttaagttataaatagttggaaattatttttaaatggaattttgtctcatttacatagagataatcaatcagatgttagcaactattttattttatatttgtatcagaactgattttttttattcttagttcaagaaaagagaaagagcaacgacatgaaccatgtaagtaaatagtcacaaagttaagaaattcatagtttgaagtaaaatatgtctatcttgattccttaaaaataaaatgaggacccagtgttattagcatggaactctctttgtggactttgtaaatctcttctatctttccaagtatcagatttatgcagaaaagtctttagcttagtgtgtccatcttttaaaggatctgacatgcaagttaaattttaagaatgtggttggtataaagatctttatttaatcttaaaataaatcaaacaacaaaattagaataactaagttaattttccacactgtctattgactttctggtatagcaggtaaaagcacagctttctgggtataccatgacattatttttttcccattgctttgtccaattgtagcacatttttattaaatcagtaatatttacatgattctgcttatgccagtattatttactgctaagtcatacggtgtttcagctgtgcatcttcattacgtatccttcattcctttaaacagttctggcatctgagcacttcttcacttctcccagataatccttttcctggcctatgttagtttacccagccaaatgcagtaagtagccgttggctggtctctctgctttcacatcctgtaatttttagcatagaattaattgtctgactatattcatttgcctgtctctaacagttattcttaccccaagtgttgtaatatttgtcacatgcatatcaaaaatattcatcagctcaaatacatctgttttatatttctcttggggcaattttccttggccttttgtcatcctagttcagtgtagagtggctttcctagatgtgctacatgcttgcttttctaagctatctcttgaaagtcttctgagatctcacttaactgccctcttctgtgagattccctgagtcctagattctgtgtttccttctgccttgttatcttctctagttgtactagagcacattttcctgggaaagggcacatgggaacatgtttagagacccagccaatcttaaaacccttcttctttgatacagtataaaattttaggttgcaaacaactaaaatgcatactaatagaaataactcaatttataacaatatagttagaattaataccaagttaatttcagtagtatataaaatcttgcttctaaatagctctgttctctaccctcttctttgtgttattgttatacaaattacttctgaatacactattagccaaaaaaaaaaatttaggttgaaactaaatgttacagttctaaaggtattttgtaattgtgttcttattatagtattgttttttaatctgttgccattgtgtgatacattatttgtaaccgggttttacatatctctagaagcttttcaggaccttctttctctctgggattctgaaattttataatgcagcttggtgtggggatcttttctctttattggggctactaagtcttcagattatctcttctagagaatttcttttcttctctattttctctgttaaatttttctgatattcttgttattcagatgctgggctgcttagactcctgtatccgcattggtttttaatcccccaccccctcctattttccagtttgtcttttcattctacttcttggatatttttttactttatagtttaatatttctcatgtttctcttgttgagggcatttttttaaagttttgctccaaaatttttactggtcccatgaattattttttcctgttgttttgatctctcttgaatggtggtccttggctttcattggaagcaggacttctgttcacgaaggagactcactgtgaggttttggaaatgaagccagcatttcatttgggggacttcagtgtattatctggggatctttactctgggaccattccattccttccgagaaggctctcccaattttctgcctgggatgtaaaagcatggctacttgctttccagaagcagaggtggagttgtgtttcttgctgtacagtttttttccatctctcaggttttagctatggtatctctgaacccagaaatttcaggttttatatatccagagaacacacatttaaattccttgtaagatggaaggacaggtagacttggggatctaaccacagattttcaactgacctcgctcgcttttattttatgtctcaccctactttcagagatgccatttccctttaagttgaagtctgccttgggttctggaagacaaactggcttgcttgtttctgttccagtcacttcttgtaggcaccaaagttgtgctaccatgccagttaccactccattatctactttttataattcagcatttattaaaaatcatcagtgtcaatcttccctattggtcctgcatataacttgagttatatgagtaattctaatgaaatttcaggagagagggaataaatttatggtcaatctattacatttaacccaaatttatgacctatatttaaagtgtaaattataatttaatttcaatataattaatattaatccagataattttacttatatatttataataaacattacacttttataccattacctttttaaattttctttttatttctgagacaaggtctcactctatcattcaggctggagtgcagtggtacaatctcacctcactgcaatctccacatcccaggttcaagcgattctcccacctcagcctcctgagtaactgggattacagcgcccaccactgtacccggctaaattttagtagagacagggtttcatcatgttgaccaggcaggtctcgaactcctgacctcaagtgatctgcctgccttggtctctcaaagtgctgggattataggtgtgaaccactgtggccagcccttgtttagtattcctattcaaattttataccctgccatattgttccattacttcacactataaatggagctgttttcattaatgcccaaagtgttagaagtattaaattaaaatgtgttcatttttagcgtggtcaacatagcaagactgcatctctacaaaaacattaaaaaacaaattagccaggcatggtggcatgtccctgttgtctcacctactcagcaggctaaggcagaggattacttgagcccaggagtttgaggctgctgttagctctgattgtgccattgcactccagcctgggcagcaaagtgagactctgtctaaaaaaaaaaaagttaattttttgaaaaatacctaaaatttgtcctcccaaaaaggagagagacagaagtaaactttagaattttcaatgggctaaaacaaaaggcagcaggtacaatgaaaaaaagtcagtataggagttcaacagatactggacctttgatggtaatgttttggttttggcttactaaactataaggtatgatgattttctagtcttcattattcaaccttaagaatactaagtaacactttccattttgtgttaaagtttgtaaaattttatattcttggtatttatgctgactgaatgaagataatttgttcctttctagttttgactacctgaaataatacctataaatggtaaattgttactgtatttgatataattaaatatagtaagatttatcttccaaattggaactgatttaattaatttgtcaagcacttgttgaacttttaaacttgtccaaaattctgtgctcagcatctccaggtagagaagaaaggactctcccttccttggaaagacctactttcttatgaggggaatactctgtaagaattggtatcatgtgacaagttgtgaattagactgactagtttacaaaaatggaaatattctgtggtgtggttgctggcaaaggaatcacagagggtaaatggggtcaagtttgctgggacaaagaaaaagaatcctaggcagagagcagcaggaaactgtgtggcaggaaaatgcctatgcgcaggtcaaatgacttgtagaataaaatgaatcaactttggaaatgaatggaaagtactctccgagagtctcatttgagtgatgtcctggcagtcttattgaaacatgaagtgaaagttaaattcgtagagttgtctttgttatctgttttcaggatgtgagagaatattaaagtgatagtctttttatcttctatgtaagaaaacaggactagagaatgctatggctttctctgttgttggttatggagcagccctggcacacagagcctctgaatctaaaacacttgttttgtcccactgtctcctggaatattacatttaggattagtaacttagtaatgtagcattagtcttcattcattgcaataaaatgctcttgtgccaatattatttaatgcattacagcttattgcagtaagtaaataatagaaaatctcagctgctttatattgctttaaaaacactgacatcttaaacatttctcatttataaagaaggggaattcacaatagacgcttgccaggtctgatgataggtaccatattaagggcagccttttataacccatttctcaaacatcctctattgaatttaagagcctccaatgggtttcctatggagtgcacataagtccacactcagttcacgaagtgtaagaagtaccttagtactttgtcatttgacattttaaccaatgggaaaaaatacacttttataggtttaacttactgtgatgttttcttctatttcctttccccttcaggtatctactaagcattttactaaaaagtacagctcgtgttcaaccatatacctagatgacagcacagccagccagcctcatcttacaatcatagtaaaatcgtgagtacaactatgatgtcaagggacacagccccttattctaagatcatcctagccatcctcggttatttcagccgtttgattgtccttttgggcaatcagtttaagaaactggtgtcaactatatattgatttctgattctatatattagttttcaaaaaaatactaattttcagtttctcctttaactttagatttcacgttggaagggaaaattagttagcaaataatcaatccctggaaaagtatagttatttatttgatgcttttatgccttatgacaatgttgaacacaatgagtaagataggtgtcctttataggatgttttccccccaaaaaaaggtttcttatgagttacaggcctaaatcaatcaatgtgtactagttttgacattaatcttggaagaaagaacaactttttctctactggcaccgtagtgtatctgcatttgacttcccttcattttgcatgaatacctcatagggcacaagtgaagatgcacttttagaacaacctaagacgagcctttcaagtttattttaaaagcaacaacaacaacaacaccagctctgttggggttgtctagagaacatcattatcatctgcttggattatgagcgtttaatttttggaacacagttttagaacacagtttggaaagtgctaatttagaatattaatgtctttatctttcattgtacttctttttcttcacaagaggatggttgtcagttttacttttcattctataaacatagctagcttataaacaattttgtttctaatgcactagctttcctagccaaaccaattgtcagtaacttctattttaattaaaagtaggaagtttacactcatgataatgtcacttttctatctcacttctaacagtggttgagataaaattgtgtttcagcaaaaacttgactcaaactctgtctaaagtcttaagctttgtgacctattaagtaatccctaaacttctgtattcagccaagtctctaaacccttgggaaaaaaaattactgtactttggctagagtccctggcttctattcaaaagattgtaatatgttagtatacaattcaaaagtagttttaaagattaatcttgctcaaacaagtattcataaagtttatgtttttttcctccatcattctaatttttagaattctacttttggaagtgtagtaagttttaattttctgtcagcaagtttgagaaattatcacttggtatattcactattggtaacataaaggtttattgagcaaattaatagggcaaaatgggtttatgaacagattttggaaaatgttttatataggtgagtagagcattgttctcaatggaatgcatggaccacatttgattacttacgcaagttttcttaaaatatatgtctgcaatcacatgcctcttcctacctccacctctccttcaactctaggcactcagaagccttttaagaaaatagggatggatgtgaggcattcttatatggataaaagcatctcagaagattctgctttgaaccccaacccaatcattcggaaaccctgctgtacattggaatcacttgggaaattttaacaaccaccctgatgttcaaagttatacacaatgctaattaaatcaaaatgtctcatgttaaaaagaaggcagtttttaaagctcttcaggtgattccaacgtgcagcaaagtttgagagctactgcctgatttgaatttaggacaacaagctgctcctatttggtgggaccttgggcaagtcaattttaaacattctttttcttatctgtaaaatggtgttggattcaatgtcatttagatcattggtccttttcagcaggtaacttcacattgtgtgattttaaaattattttagagattaaaaacttcttgaagcactatagacatagccatcttagatactaatgttacaggcttttaaaaacatgctaatattatataaacctattgttaaattcagatttgccttccctcaattatttgagcctcattttagatgctgtgggcacatggaaaaacataacttatgtttcctaatacacagtgtctgtagacaacttaagaatacagtaacatatatctgaagagttttacttgttcataaatatttcacttaaactaattgaaagtacctgcccttaatattatactgtgtagtgctatgctgcattatcgttagcactgcttattttcagaaagctatcactgattttgtgtgtacctaggtttactaacatgaattatgcaaaagttattgtaaatgatttaatttggtataaaacacttttatcattaatttttaggaaatcataaaacacggatgggtaggagatagttaattaaatcaactaaagtgcagggcctaacaacttaaaaaaaacactactgtatgtcttaaatttaagcatatgtacacataggtataaattgcatgggatgaaaggttttgtgggtagaagagcatctaacagggaaatatgttattatttatatattataatcatcaacagaaacatgtcttctaacagtatattgcctagcattttgatcctcgtatttttgttaaaagacaaaaaactaaaacaagaatatagtgccctaatggtactgttctgaagtagaagatttaaatttcagggccactgggataatttcttcctccccccttttaaaaaaagtttttagacccaacaaatgataaaatccattgttatgattttttctctttccgtagtgtggccttagcaatatattatcacatgaagaaaaggtgagttcttttaaaacctttcttgttattccaactcattactttttataatatcaatctcagtgttagttcatagctatagacaccataagctgtattgtgcctactgaaatattgaagcatattatttgtgttttctttcacccttgagactctttaagtcctaacttattgagaatcccaaagaatctgtgtttatatactgtgtaagaaattaaaattgagatttttaaaaaatctgcttctggcttggattttactacctcagcactattgataactttgagctagataacgctttgttgtgaggaaataaatgctttgttggtgcattacaggaagtttagcagcattgatggcctttacccactagatgtcagtagtaagcaataacccaggttgtgacaacaaaaatattttctgaaaactatatcgttaacataaatagcattttttaaagaaaaataacttctctacaataaaaagttgagtaaaaagtgtgtcatgcattgatattattgcaaacctctaaagtttggcataatagaagacagatggattcccttcacaatatttttagagaagcaataagatgatcaagctttttgcaaatatatagttactaaaaggtgtatctttaatgtttttagataattgtgagtgttctttaatactacctcaaaactcccctgtaactagtttcttagttacaggggaattttgcatatcaatacatttattccatcaatactcactgatttttcttgtgcagtaaatgggtctttcccccatgcttgcttgtataagagtatgcattggttatttgggaaataatggtttatgttttgttgtgtcaaaaactcacttttgttagtatcaccatgtcttattaagagctctttaagtattgagaagctgtcgagtttacggtaggagtgtgttttccaaagttctgggttttagcctgaaagcttgactattatcattgagaacagttattctctttttttgtttaacttttatattaagttcatgggtatatgtgcaggtttgttacataggtgaacttgtgtcatggggatttgttgtacatattatttctctgcccgggtattaagcctagtacccattagttattttttctgatcctcttcctcttctcaccttctaccctccaaaagatttcagtgtgtgttgttcccctctatgtgttaatgtgttcccatcatttagctctcacttaccaatgagaacatgtgatatttggttttctattcttgtgttagtttgctaaggatgatggcctccagctccattcatattcctgcaaaggacatgatcttgttctttttatgactgcatagtattccatggtatatatgtaccacattttctttatacagtctaacattgatgggcatttatgttgatttcatatctttgcttttgtgaatagtgctacagtaagcctatgtgtgcgtgtgactttataatagaatgatttatattcttttaggtatatagccagtaatgggattggtcggttgaatggtaattctgtctgtaggtctttggggaatctccagactgtcttccacaatggttgaactaatttacactttcaccaataggggaacacttatttttcattgatgtaaaaggcttactttattcatttttgagaatgatagtcagttgtacttttaaataaaaacaatattttatttaaaaaagtgattattcagtttacatttaaatcattgtttctttttcttaacacaaccatactgcagtaagaagaagtgcttcttgttaactttccacttattcagagtattaaataggaaggcaaagatttaataataccattaattgttactgcttcatcaaagacattcttaactaaatcaggctctcttttttaactgtaaggggctgtggagaatagaatgacttctagtgtaatttgatcaccttgatttatgctgagaaaccttgatttatgctgaaaaaccagctatttcacccacttttgcttttataaaatcatggcaagtgtcacagtgagaaagcaggcaatgccttcatatccttttaaaaattattttaatttattttttatttttaatcagctttctcaggctgaaatagtatttttatcagaacagttttgactgcttgggcctcatgaaaaatggcctgcatagtattccatggtatatatgtaccacattttttatacagtctaatattgatgggcatttatgttgattccatatctcaggctgaaatagtatttttatcagaacagttttgactgcttgggcctcatgaaaaatggtctaggggatctccagaggtccacagagcacattgcaagaaccattggtttattaaacaggcaaaatgtattagttgtattaacctcttaagttcatcaaagactggcctgtttgaaaataaaaagacagattaagtttttaattcaaactacttaaaataaataaatatatcatgagaatctaatacagagaaaatgatgataaagagaataattatactattatcagtaattgatagtcattattatattattattaatactttttaattagtaattattaagagaaaaagactagggaatctgaatctcattcacatttatttatttattttattttattttatttattttttattttttttgagacggagtctctctctgtcacccaggctggagtgcagtggcactaccttggctcactgcaacctctgcctcctgggttcaagcgattctcctgtctcagcctcctgagtagctgggactacaggcatgtgccatcatgcccagccaatttttttttttttttttttgtatttgttgtagagacggtgtttcactatgttggctaggatggtctcgatctcctgacctcgtgatctgcctgccttggcctcccaaagtgctggaattacaggcatgagccactgcgcccggccatattcacatttactaaagttctaaagactttattgcccattactactgctttctaaaacattcttgtgttccaatgtcaggttagaggagtgaaaatacaacaggttcattaccatggcctgttagggagggtcagtacttactggcaattctgactggttactgtaataaaagacttcataggacttgatgtgctgagtaagaagagtccaggagaccctctgaaggtcaggctccgggagaaggatttgtaaaacagtttgccttggtgaagcaaaacagcaaaacacacaggaggcattattttactaaacagatatgtttagtaaatatattaatcatttctgaattaatttcttaaatgcacatttttactttatagagatgcagataaatccctcgatatgtttgacgagcaattacatccactcactgtatcacttttattgaggccgtatttttctcatagacttgtgtttgtttcacactgaagtcaaagacatttttaagtattcttccccatgccatgttgcatctaatcgtcttatttaagaactgttataaaaaggatgtgctggaataagaaatgacctgcagctctggttaattagtgagctaatgagagtaaatatataatccaaataacagaaaatgtatcttttaaaaagataattgtcagtagcatcaaacaataaacatttttgtaaatgcctttaacacatatacatgatttctgtgaatagaaataaaaaacaatgtaaatttaaataaatggtgtacaaattaaaagtgtacttcctcaggtacataatagccacatgtggctagtgaccgttgtattgaatagtgcaaccttagagccttatggctacagaaaactaaatgtgttttttcaaagtttgttgcagaggagaatgaattattgtcagtaagtaagactttaaagcctaaaagtagtttacatttttatagaattctatgggaaaaagagtagaaaggaacataaaaattttctgagcttgagcccatttttttcactgaatgttgatgactattgaatcattatagtatcttaagattccactgttcgtattttagaaactaaaagacatctccccaatccaaattgttctaagtgacacacaggcacaagtatgaatattgctgtcttaagaatacttcatttttttttccaacggatacttacatcacatcctttcttctttcagcaagaaaagatgccaaaggaatactttgagtatgttcctgaacacaagtttatttacagatttgtccatgttctttttaaagccacaaacctaacagctgaatttgcaatagtaactttggtaagatatttcttatttataaagcatttttagaagttggtacttgtacacagggtatggtgctgtttttaaataaaagttggcttctgggctgggagtggtggctcacacctgtaacttcaacactttgcggggaggctgaggcgggtagatcacctgaggtcaggagtttgaaaccagcctggccaacatggcgaaaacccaactctactaaaattataaaaattagccaggtgtgatgggggatgcctgtaatcccagctaatcaggaggctgaggcaggagaattgcttgaatccgggaggcagaggttgcaatgaaccaagatctccccattgcactccagcctgggtgacacagcaaaactctgcctaaaaaataaaataaaataaaaaagtttgcttctgaaattattatacaaactttaagagaaacttatgaaagcaaagtaaatacacacattcgagttgtatcatcattacagcttaaaatgttgccattgcgtttttcataatagaaccattgctattaaaagcagcgggagagatttctgatttcccccccacacatcagtgcatatgaagtgtacacacatgcaaggcaggcggaggtgttgggatggggagcagtaaggagacggattccagtggagctctgagctgagtcccaggctgcattcctcaggcagttctcatgcaggctgtgattgacagctgctgccgtgtcgtctttgttccttgggccatgagtcttaatctacccctactgatcacttgtgcctgcttatgaaattgcccaggaatgtggttccagtaggcctgggacacaagctttgctcgttagtcttccaagccatagctgtttccttacatttacatcatccctacagaattcctattgtaaaaatgttaataataaattctattcaaattgttgaaattgttttacccctcttcacagccaacctatagaggaaagtcaactgcatggctgggaaggaaagaatacttaggtcaatacttacttatttaccattcaattagagtttaggagagaaggcttctgatgtgcacttgagtcaaagccctcaatgggtgctggaccagacacaggccttttcgaggagctgcaagtcatttggaactctcagcacatgctggagggaagcaggagtggtgcttccagatttagacagatagatgatgctggggggaaagctggattggaaaagggagagttttgtactcaggctaaactagatgtgccttttagatagcagagtagcagtgtctagtcatcatttggatatatgggactagagcatgaatttgtggtagagatgcagagtgaagagtaatagcagctgttcaaatgcagagtaagtgtgtagaataaaattggacaagccaggcatggtgggttcatacttttagtcccagctacttgggaggctgagctgggggggattacttgagcccagtagtttgagtccagcctaggccacatggtgagaacccatatcttgagaaaagaaaacataaagccaggtgtggtggttcgcccttataatcccagcactgtgggaggccacgacaagaggattgcttgagcttaggagttctagaatagacttggcaataaggtgaggccccatctctacaaaaaaagaaagaaattagccagccattatggcacatgcctgtggccccaggtacatggtagactgaggcagggagattacttgagccaggaggtggagactgcagtgaatcatgatcatgccactgcactgcagctcgggcaacaaagttagaccctgtcttaaaaaaggtaaagaaaattgagagacgataggtctgtaaggacttatagtgagtaaaggacaggcccccagaggagtagctgctagaatgggaggaggaaaagcaggaaaggataataaaagagttaaaagatgctgtggtcacagtgctgaatgctgccgagaagtgactcattccataaacactcactggatactgactctgtgtcactcttctaagtgctggggtagaagggaggacaggttgaatacagttcttgcctttatgagcttatgttctagtgagacacaagtagtttttcaggtagtgtcaaatagcaggaagaggaagctggataaagggattcagagtgtcggggtgctcagtactttagatagaatgataaggaagagtctctctagagagccaacatttgaacagtgacctgcccaaagcaacgaagggaaggagtgctggcattacaggcagcagagacaggaatgtgtttcacatgtgttcacagaacaaacagcaaggtgaccagtgtggtcagagtgaggaataagggaagcagtggagataaggccacacaggcagggccacagctcacagggccttttggcttcaggccataggaagatgttaaggttttattccagtttgataggggactcatgtagatcttgagcagggaagtgagtgctgttaataaagaggttatggtgactgctttggggaaagtaggccatggttgggaggcagattggaggcagagaagagggctaaaaagcaattagagtgatacaggtgagcaatgagagattgtggctcataatcaacccaggcagactaccagtgaaggcagacataacaggcattggagacattgcagaagggtaactcaaatgcaggtatttggccccagcagctaggcagatggcaatgtcctgtacaagattagaaaaggcttggggggttgactgttgggctggagacttccagtttgtaagtgtgaaggcaccagaaacctaggcaagagaagtgttggaagagtaatgtcagtggggcaggcagtgtacattaaggagagatggaagatgaggagctggcatgagggcatggtgctgtgagcaccaatgagatgacacagctggaggagtagtggggagtgagatgggaacaaaggaaacacagttagattggggaaaatcgctagtagagaggcacaaaatcttcaaaaagaggtgattgtaggaacagtgttctgcaaaagtggaatgggatcaactgcactgagaaaagttggcatcagtggggaaaacatttctacatctgagctgatgatcataaccttcagacaagaaataaactcgtataaaataaactttttccctttgttttgacataaagagttcaggtagctcgcagacatactcttctgcagagcaccctctgaggtaacacctcctcacagctcacctttaatctttactcagctgttcactttgcccaattctttgtaaagcagatgtttgataaatgtaaactatcaaacatgtgctaattcatgagattgtctcacaaactactcggcaggcttagaggaatcccagggatgcagaaactggcagctgtttccacctttaaaccaacagaattgactaagttgcaggatgtaagagagaataaattttcatgaagtgatcatgaagatgggaaaataggggctgagaggagggccattcttttatacacatgtgttttttatcaagcaactgaatactgagaatgttttacaacccctgagacctgcacctgccatgctgctctgcacagcggccactgggaggctctcttgaccagcagttttttaagctagcaccacaaaagggttagtgtttgtgaaaaggagattaacatttgctcactatcacatgggttttatatattcaagcttgacatgcctgtagaatttctatctacctcccagctaagtatgagacattacatttggtaggcacttgagtatttcctgaacaacttcaatccacactggtccttagtgtgtgctgccttttatgagtgtgaagatgatgacactgcctctcttcatggtggccttggctgacatatgcaggcattcttgtcaccgaaattgggctggaaattcccataggcagagtaggcagcagaagtatctgacctatgattgtaatgtggtctcttgctttgcctgaccaagcaaagtatgtagagcataagaataaaagacactttctggtcaaaaccagaagaaatctgtcattcaaaagagttcttatcagagcacttaaagtgaactaaatcaaaggccagtgctctattttgcatatttacatagaaagactcttaagttatgtggagatagacctttgcccgaccaactggaagagattgtcatgggagccattcttctcacctccaaagtttggaaagatgtgactatatggaatagggaatactgcaggctctttgtgaacactagcattaaagacatgtgagtttctaaggtttttgtgaactttctaaccattttcattaccttatttgctcccataaatgtaacactttaagacatatttttaaaggctacagtgtgcagataaggaaaacacataaaaccacatacttctttatatccagctttagtataaaagttcatatcttttcactgttaatgggtaggtcttggtgagttactgttgtaataatctgctctgctcatacatggaaaagtatttttctggtggtttttggcaaatacttcacaagtgcactaccagaacaccatagcacagtaaatatctttatggctttttagaagctgtctgtaagttccagtctctttttaagggacacatgtctggctgttgaaataattggccactcttaaggtctagggcctctggactatggagaagttatagcctcagcctcagtcacacattgtgtatttgcttttgctgatgttttctcccttatatttaaatgtctgtttttttatagaaaacttgagatgcagaatagccacagatccctgtgccctccccattaggagtgttgcatgtgtttagaaattgggttgatgagtttgctgctccagtgtttccttgaggcagtatgcaaaaaattgcccaggcatcacacaatgcccaccacactcaagaggctcctggggcactcatacaaccacagcagcaatctgtgggacttgagttaccaaggagagtgcgagaaatcttgctgagtcatggggttgctcatagacggtgccaacatgatactgaaacatgggcttcatgggggctttcttccagtctggccttacgactgttgtaaagggaagagccttggagcttgtaagcagggtgagctagggaagcatttccaccaaacactctagtaatgtccacaggacagtgagaatagctatatgggtgacacttaagaaaatataaagggacacctgttgctgtcgttgagcagcatatgaagaacaatatcatgacaggcagtggcaagagtttgtttttttacatttgcccgttactccagataagactgccatccagaatgtatgtgatcacaaaagtagagcttgatggctgattagaagtctctgccaattgttctcctcataagaataacaaattgagtaactatctaaataaaaaacacctttattagaactaaaaatagctaaataattatagtacctggtttaaactttgtatcactgaaaaaggcagtgaacacggtaggaaagacagtcttgagttgctgatgccagccctcccttatgtcctagcattggccatgtgacaagaagagaatctgcatgcttggggaagggagagcacagcagtgtgagactttgcattgaactcagtgctgcgttgtcatagcagaaagcaaaactgggctgaactcagccagtgcccacccacggatggaacatttctagccctagcctgaagggaatcacccatcccagtggctgaaaactgagttgtggaaagcctcactgctgtgggataaagtattctggggtccttaataaacttgaaagactgtctaggccacaaggaccgcaactcttaggcaagtctgagtgttgtgctgggcttggagccggtgtatttggggggcatgtgacctagagagacagcagatggggcagcccagggagtgctgtaccacccctccttcaatcttaggcagtgtagctcacagctctgacagagacctctttcttctgcttgagaagagtaaagagtaaagaggactttgtcttgcaacttggatactagctcagccacagtaggagagggcactggtcagagtcatgaggctcccattttgggtcctagcttttggataatacctctagacaaaccctgggccagaagggaacctgctgccttgaagggaaggaatcagtaagggcaggattcatcactttctgactaaagagctcttggaccctgaataatcagcagtggtaagcaggtagtacatgtcatgggtctttagtgagcctcagagatctgctggcttcatgtgtgacccagcacattccaaactgtggtggttatgaggagagacaacttctgcttgagaaaatctgagggaagagtacagaggactttgtcttgagcttagacaccagagcagccacagtggagaaaagcaccaagtgggctgttggggtccctgattcaggccttggctcttggatggcatctctgggctttccctgggccagaagggagcccactgctctgacgagtgagttccaggccaggcagcattcaccacaagctgactgagagcccttgggccttagtgaacatcagtggtgacctggcagtacaccccaggggattgtgatgctggtgaacatggggacagactactctgcctgggtaatggggaaggaagagtggaaaggtgtttgatggttttagtgccagctcagtcacagtaaaacagagcaccaggtggatttctaaggtttataaccccagccctagcccccagacagcacctctgaacccatccaggggccgggggaacttactacacttaagtgaaggacagaaggttctctggcttcactacctgctaattgtagagccttggggcttactgcaaaatagctggcagccagggagttgttacagtagaggccttgggcagtaacagtgctgtgtgggcttcagatcagacccagtgctgtcctaggtgtagtggccacaggggtgcttgtatcactcatcttcgaactccagaaagctcagcacagagagactctttttgtttgggggaaagtaagagaagaaatgagtctctggctgctaatgcagagaattcttccagatcaaatccgagatcactaatgtgctacctctacatatctgcaagaaccaatgacattcttcatagacatagaaatagaaaagacaatcctaaaatttatatggaaccacgaaagacacagaatattcaaagctattctcaggaaaaaacgaaaaaaacaaaacagaaggagtcacattgtttgaatagaaatgatactctacaactatagtaaccagaacagcatggcactggcatgagaacagacacatagaccaatgagacagaagagaaaactcagaaacaaatccataagtccacagtgaactcactttcaacaaagatgccaataatacacaatggggaaaggatggtgtcttcaataaatggtgctggggaaactggatatccatatgcagaagaatgaaactagtttttctcatcttatacaaaaatcaaatcaaaatgcattgaagatttaaatttaagacctcaaactatgaaactaaaataagagattaggaatattcttgaagacattggactggaaaaagattttttaatactccataagcacaggcagccaaaacaaaaatgggcaaatgaagtcacatcaagttaaaaagcttatgcacagcaaaggaaacaacaaagtgaagagacaacccacagactgggaaaagatatttgcaaactatctggattaattaccagaatatatgagaagtgcaaacaactctgtaggaaaaaaactaataatctgatttaaaaatgggcaaaagatctgaataaacatttctcaaaagaagacacattagctgctgatggaaaatgcttctggttcctgctacaagggaggcctggatgggaaaattacctgtgctcaggaggtcaaggctgtggtgagctgtgattgtgccactctccaacctgggtaatagggtgaggatctgtttcaaaactttaaaatatacatacaaatggcaaacagatatacgaaaagatactcaacattattaatcatcagaaattcaaaccaacactacagtgagacatccatctcacctcacttagaattacttttatccaaaagacacgcaataacaaacactggataggatatggggaaaagggaacagtcgtacactgttagtgggaatgtaaattagtacaacccctatggagaacagtttgggggtcttcaaaactaaaaatagagctacaatatgatccagcaatcccactgctggctatatacacaaaagaatggaactcagtatatcagagataagagatacctgcactctcatgtatgttgcagcactatttacaatagctaagatttagaagcatcccgagtgtccatcaacagatgagtggataaagaaaaggtacatgtacacaatggaatactattcagccttaaaaaataatgagattctgttatttgcaataacaacatggatggaaatggagtataatgaaatggagtattaactcattatgttaagtgaaataacccaggcacagaaagacaaacttcccatgttatcactttttatgggagctaaatgttgaaacaattttacttgtgcagatagagagtagaagaattgttaccagaggctggtaaaggtagtatgggggatggggagtaagaagtaattgttaatgggtacaaaaatgtatttagaataagatctagtatttgatagcgcaacagggtgactatagtcagtaattatttaattgtacatttaataataatgaaaagattataattagattatttgtaacacaaaggacaaatgtgtgatggatacttcatttaccttggtaggattagtacacatcgttggcctgtatcaaaatatcctatacaccctatgaatatataaagctataatgtatgcacaatttttaaaaaagactatcattcgtccaggctcggtggcttacgcctgtaatcccagcactttgggaggccgaggcaggcggatcatggggtcaggagatcgagaccatcctggctaacacagtcaaatcccatctctactaaaaatacaaaaaattagccgggcatggtggtggacacctgtagtcccagctgcttgggaggctgaggaaagccgtgaacccaggaggcggagcttgcagtgagccaagatctcaccactgcgctccagcctgggtgacagagcgagacttcatcccccgccccccccccccccccgccaaaaaaaggctatcattcagaattactacactgtgcataatatacaattgaagtgaggatgttgtgactaacaaaagactagtgactgttggttgctgttgaaatggctgttggtgaaaatgaccactttgctgatagtataaacgagtgatgatggtgatgttgctagtagccattttagcaaaagatgtgacagaaaattaatttgaaacagaagtactttgaaagttgcagacactaaactgactttgatcactactgtcatcagtctgcagactgatttctcaaaggaaacaaaatttgtcattatgaacacttagctttgctataattgcagctaaattattctcaaaacttgcaactaagctggctgagctctagttgtagttacaaggtcagggaatgtgcaagttctcacagacgtgagctccaggggcagtggtgtcagaggcctgctgtaagaaacccagttctacacaatgctgtttgtgaatgtggaagcatcagaagctatgctctgcaaaggctgcttttgtttatgatctttggaaactggaaagcattacaacaaagtgttgaatatacatttaccttgtctccctgctgttgattatgcataataatcttgttttgactgtaaattggaccatttaaaaatgagtgtctattgggtttttcttaaaactcttcaacatcttcatgtcttgttggaatatattttccttcaaaatatcagttaaactgagcagctgctcttaagaaaatgtgctgtgcctgtaaagggtatgctgttcagtcatttaaaaaaaataaacaaaaaaaactaagaagatccatatcctgtaggcctatgcttatcttcagtaactaaacctctattaataggtgtaataatttaataaaatattgtatttctacacagtcaaaatgtgttcatggaaaaatgtgagataatataaaacaaataaatacaaaagtcctgattagctgattattaaaacattgtctgatttacatttctatagccttacggtcatatgaacaggaaattgatgttggaaatagtttcagatgggttttcagttaaacagatgagaaaactacatctctgctcatattttaactgctcttccagagaacatcaaacatttgttgacttagccagtggataagatattaaaactttaaaaccaagaaactaaatatgttgttcaggtattgattgtttttatacaattaagtctttacagggattactgtgaaagtggttctatattattttatattcatttgtttaaacatttaacaagaagccaggtacactggctcacacctataattccagcacttttggaggccaaggtaagaggatcacttgagcacagaagtttgagaccagcttgggcaacaaagaccctgtctttaattgaatttttcctttaaattagcccagctcagtggcatgagcctgtagtcgcagtgacttgaaaggcttaggtaaatggattgcttgagcccgggagtttgaggctggtgttagctaggatcatgtcactgcactttagcctaagtgacagactgagaccctgtttcttaacaaaaaaaaaaaataggcaagggcagctctatgatcatgtgacagaaggctgttctcagcctttatctctcccactgccttcaactcatcccccacattctgttctgtctgtgggtgacagaagctgagcaccttagggttttatttccagctcaggagaaacactgagtaagtccagtgccctgccagaagtcatatcataaagtgagtttagtctagccaagatgtctctctttaatctctctgccttccagtgtttaaagagtattcctgtcctgtctagtgacagtttctcaccttcataatttcaaggtgagtagaaactggcgttatgccctttgacatagcctcatgcactgaggcagaggggagggattccctttcccatcaaatgtagcttatgtatgtatttgagaccaatccttgttgttttggagtttttcctcctcagaaataacagggtggctctccatggatccatttgttgccatggtgttgtacccatggcttttgttggtgttttttgacttcagtaagcctctttttgttatccttgtgaaaaagtctgcaagttcttcagagctaataaatggcattcatcattcctgtcatctgatcactgttgtggggccttgtgagtgagcatggagtctgagctgtgcacctgcactaagggaactctcaagaatgagccccgagtcagcagcacatatgcatgagaggtggtcacctttctccccatcccagagtcagggtgctggatgcagaagggactgcaagcaactgtgccttgtttggacattagcataggaatccaactgggtagcctttatttgtttcaaaacagaatttagagacatcctagtagctcagaattatatttttaaatgaatagaaataaattttattaaatgacaacagaaaaaaaccactacatgtttagtacatgaactaaacttatgtagtattgtttgaagggtatctacaaaattctcaccctaatgttttcttgcaaaagaagtgaaaatataaagtgaagagacattctgtaacaaggaaccactgagaaacacaaaatatttaaaagtcatataaaatttatgtgcatttttgaggattataaaataatcagttggcatcagacttttcattttagcaacatttatagaattattttctagtgggagttttcacacaacttttgaaaaatatgttaaaattgaaaactttcttgtattttgtaaactactgaggttccaattcagggtgctttttttatatttataaggtccatctctacagcatgtaatatcatgggtctttgagtgaatatcaactaaaggcattctgacattctgtacattcataggttttacctcagaaatgagttttttcttgtcttcaggtggaactggaacgagtaaaacactaccatatgtttgtatttataaggcttttcttcattgaacccttttatgttttcaaagagaaatgacaaaaaccgaaggctttaccatgtttcttaaaattttgtggtttttctccattttaaatcctaaaatgtctttaaaagcaagtgggaaaatcaagtttattatcacatgttttacatttatgcttttcccccagtatgagtttttctaagttttcaaagagaactgagaaaattccaggctttcccatatttattacataatagggtttctctctagtgtgtgctttttcatgtgttcttaaagaactagaacttataattgctttatcacatttcttacatcagaataatgtttttgaagatagcccagtggactaacattgtcccatgttggttttcttgtgtttctcctcccacaggaatgagcttgaaagacagtttttgcagctaattgactataacgtcgaagtttctggaagtgtttatgccaagtactattttgatcttcgatccttggcaaaggacaatagcttgcattttccagtttatcttctcaacaaagaaagggcacagaacctggaagtaaggcgataaagtcactaaggggggttttctgtcaaccaccaaagccaacatctgtgactagattagattaagtagtgatgagaaaaatgaaaagctccaaaattaacttacatactgaagagcttatttcctgtatcatttatggtttatacaagaatccacattatttaaatattatagatctcttctgtgaccataattcagaatatttttaaccaaatttaattcagtcttagtggtattctttttgaatctttgccctttcaagtaagcatacatgaataatttcttgcaattctattttaaatgatatctgcatatgtaatgcacttaccacttttgcctgttttttattacttagtttgcaaatttatgtcattttttattgtatatattacagtgcagccagttccataaatttgttaggcaaagcattagtgcttaagccaagagacctacacttagtctgtataaggtatgagcgtctcaggtagtgatgcaagaagtacatgtgttttactggaaatggtaacttttggggggcaaagcaatatttatggtttgtgacttctggtttcagttgtgagcaaagttgcaactgaaatggatgcatatttataattagtactttctgtggtaccttagaagtactttagaataacataccttctaccataattaatgtgccaggttctgccttttgctgctttagtcgttcgacctctttgatgttccagtgcactcctgcacacatctgcttcattcaaatttgctttgaggatataataactactgcagatggggtagactctgaatagattaataaactataaattttcctttgctccagcaatctaatcatagcccttaaaggagattaccttagtgaggtggcagggagtagcatccccggaacctggcagtgcgaacctcagccaaaggagctgtaactgtgaactatctaaaggagcgtctgcatgtctggcttatcatcaatggtgcttgttaaaaggctggagccctttttaaaattgtacctcttttctgtttcatttactttcttaggctatttcaaggatggaagacgccaaaatcttttatagtgaaggtccttcagcgctgataatttcattaatcttcagcgctctaaagccattaactcttgaaggaagaaatgaggggctatatcatgtgaacccctcatcaaaaaagttcggaaaatattacctctcatgctcaacaactagaaaagttagtattttcaaaagaagaaaaatctcaaagttgagaggcttgtgggcaactaggattgcactccacaggaaaaaaatgggatcgttgcagtgcaacaactctcgtacactcttctgtctttttaaacgtaaacaggtataaaaactactccaaagtgaagacttcttgcccatacatagatatctttttctgtgtgtggactaatagctgtgaactatgtaagggttttaaaacaatagtttaaatttttagatttcagacataattttctgtttcttttctatttttcttttcccccaatattgctgcagacacatttaaaataaatgcagtattactattaaaacatgggactgtaataactcatgaagccactagaagcagaccgctcattttcaggtgttgaagggttctacctgcctacttttaccatcggagctgctcgtcactggcaatcattttaaacaaaagctgatggagttcatttgccattcatatcttttgtaagcattacttgctagcattttagcatgtttggggtcacaaaagaaaaactattagttattggttacctacttgtattagggtccatggtatgtttcttataaactataatgatccttttgtgtgtgtgtgtgaattttatttatttatttacttattttttatttgctgataaattttcttatttgttaaataaatgtattgagagatattttcataatgccaaaccacatgatgatccagtggtgatataaaaataataataagtgatgtgatctgaaagtttcagggcagattctagttttaatgtagtgtgcttagaccctccagtgcacggcagcttatgtatatatgctataaacctttataaaataccgttcaaaagtttcatagtatttattttttcttttttataaaagatggggtcttactatgttgcccaggctagagtgtaatggctattcagaggcacaatcatgactccacagcctggaaattctggcctcaagcaatcctcccatgtcagcctaccaagtagctaggactataggtgtagtaccaccacctctggttttattttgcaaaaactgaatattaagcttttaactttttgtttcagtcaatatctgctgtctccaagaaacgctgaaacaaaaaattaaaagcttaatatttaggagctgggcatgcctgtagttccagctactcatgagtcttaagtgggagaatcacttgaggcctagcattggaggcagcagtgctctatgattgtgcctgtaaatagccattgcactacagccttggcaacatagtgagaccctatgcctttaaagaattgcaaaactaaatacatgtataagcaatataataaactttccaatgatgttttgtaaatgtttgtagcactgatacttgtacaagtatcaaagcttaaaattacactaagacttttggaattcttgtatttttataaagtgccctcttctcttttaaagtagttcttagcagggctgttatctacgttgatcacctaaaattattttccctacatgtggtaaaggaagaatatgatcagtgttaatttacatgtaacagattagaaggaattggaccctaatagtagcaggtgattaaacattttattatcccacctgttagcctggctacaggtattatatttcatgtcctgctgtttacaaaaaagaacttccataaaccttagaaatcttacttcctcaaaaattattgtttatggagtttagagcttggagatttaagtatttattgcagttttattttcaaatgataaatgctatctataatttatgtggtttttatttctcatgtttacattaaaataaaacctgataaactgttttaattaaaatgtgaccaatgtgttcataacacttgtaattacattatgttacatatctgcctaacttacatggtttaagtcagtcttgatatgtccgaagacattttgataagttgctttcaccgttcataagttggtttgattcatgcctctgtttaagatgtaatatttgttttctctctcttaagctcttttcaaagtgaagataatttgttacacttaaaatcactgtccagccacagtacttagtggcatagtgcattagatggcatctttgaataaatggttattgtgcctgtgagaaaaaagcataatatgcttattaggatataaaattatgtaaatatacaaaagagaaaggatttccagaaatagtacagaattagaacaagaggtgtttgaagtattcaattacacagaaaaaaaattggaagtacaaaaagtagaattagtgttgctgtacagagggtgacaaaccacataatttgactttcgcacactgttttcaagcttacattttagttaaaaatatatcaaatcagttaggttgttttttagaactaagagtctagccactcagcttcagtgattctcactaaatctttaattctttagtacctaaggtaaaattttaaataacttatcaccttatcttgataaagtgctgactaaaatcaatgatctcatttaacttaaaagaaaatatttataaattactgtttataagaaagtttgcagcatataatatgacaataagcagaaatcctgacatatatgagtggtcaaaggttcaaaaaacagtttgggagagaagaactggacatgaatttgtgacttcaggagtaagtcagtagaataaaaatcagtaacattgctctcccctttggcttgaattctagaaggcaacacagtcattttgataattgggaaattgggtcaacttaggataagaatataaatgtcactgaaagtgggtaggttttctgacaaatgttatgtgagaatgtgaggtggcagggccccagaacctggcagtgtgaacctcagccaaagtagctggaactgtgaactatctaaaagagtctgcatgtgtggcttatcatccgtgctgagcatggaaaccaagctgctagtacagtggcaactatggcagttttcttatagtttgatatctaggaaatatttcaactgttgtaatacagccaccagtgaaattttaactccagtatattgtgaactgaacttttacatcattacaaggaaaagacaaagatttgaaatatacatttgaaccaagtgaaattgccattcttataagtcaaaaatggttgtctaatggcaatttcatgtggttcaccctaaggtgactgcttagagctcagtgtttctggagaaatcttatcccggccctttccttcacatttcctctttatgtaaccaatatgcccacatgttattaaaatccaacaacactaaatcccaattttatcacaattcaaggttcatttttgacctagtttttttacatttctaaatactctatttcttgatttaaaaaaaaatgccaaagccaattttaaccaaaaatcaaatcattctttgttctgtattcagctcatgcagtgtttctggaaactagtttagctgcagtatgcaagttagcttgaatttttcgtcagcaaaggcttctccctaagcacatttaagatgactgtggcctgactgttccttcacacagcattgttgaatatgaaactacttggaaaatgatttcacagacggcagagaaatctcccaggtaagtgctagtttctacgcaggatctgtagagtacgcccagaatctatcaagttaaggattaaacttaaatctactcaacagccacttccagacctgattgggcctgacattgtgccagcaggcaaggcaaaagatgtaggagcccttcagtgaagtctgcacccctataacacaagtttctaaggcaatttccattcaactattttaaatgtgttcggcaagtgtcagaacatgcacttaatgtgaaataaattttaagaatatcagcttgtggtttaggatctccagggtacaagaagaaaaactaactgggaaagtgaaatagaataaaaattatgagaatcttgagtccaatgaaataacgttaatattctttaaagaggaacaggttaggtgattcttacaactgctgtaagggagctaagcaattttaatgtgattaggaaaattcagtgatagtaccagaatttaaggtctttaataaaataccagtagtatcttcttcaaaagacctccactgattctcaaattaggctgctaccttcttgtaagaaaaatcgctttgtcttttccaccttgtctattctacaaactcttacctgtcagcccaagctggtggctcctgtgtctccttggtgtgataactgactcttccacaggtagagcttcaagtgtttttccaccttctctttcaccagctgcttcacccaagacccttaggaccctctttaaacaaaattcttccagcgttatccttgctttttctgcaatgtttgatgttggtcattatgacccactgccaaagcattattagcaccggattccagagcatgcaggctgtatgtggcttacagactaactgaccccttgtaactccctttcatcacttatgtgaatcctgtgttctccaaagcagctcttcccaacttgctgcacttacctattctcctgacctactcacaaccctcgtcatgtattctcaatctagactgaggttgaggttgcacccccaccttccaaaaccaactatttcctctggcatgaaattccttgttctgaaggtaaccccctcccatctaatggaaagcattccacttctaactctaaaattaaccttttatttacacctgctccatcaattatcttccttaaaattgcacttacctccccaacttggggaggtagcaattttggtttggttctctgaatgtctgagtgttttctcaaaatgtggtcctcagctcccctgcctctcttccactgaaagagcttatgaaaaatgaagattttctaagtccagtgtggtatcctggatttgatcctggaacagataaagaacttgagtgggaaatctgatgacgtctggagttaagagtaatgtgtcaacactgactttagttttaacaaatgtgccatgttaataagatgttcggatgttcgcattaggggaaaactggcaatggtattcagaaactctgagttattttggcgactttttgtaaatttacttttataaaatggcctcttgggccccagaactactgagtctcaatgcctggggctgaggcctgggaatctaaatttttaagaggcaacctaaatgattgttatacagcctcaaattttaaatcctcctcttctcaattccctttaattccatgtctgaacagttgcttctcccttgtttcacctacctaacttaacctgagttaatctgttaaaccttctgaattctatgatgtaagtactattattatctgttttttccctgatgagaaagctgaaatagtaggagctgaggcatccaggatcacactgctcagaaaaggtggagctgggacttgaattcccaatcagcccggctcccaagtctatgttcataaccactctccatcaaccctatttctatccacagtgagctaaaaagctctgtaggtaaagcactaaaagcagcattattgccaataatattatcctaggcctacctatttctgtaactttctaagtccaacaaacagtctttctgcttcagcatacagactttgcctcccctgcttttccactggggatgaatgagcaatgagaaagcatggggaagatgtgctgactgtaaagtcctgaacatggaagggacagttgctcttctcttaggattcagctcaactattatattttctaatctgcctctcccaactgccttatgtaccaattgaatgaagtgacagcacccacccatgtcacccaccttgacatagaattccatgctcccatattgctaattcacctcttcctggatttatgttgcctcccccaaacattttaatctcctaattactcacatagttgtgtctcccacacacttatgtctgggatcattgatggagaatgtggatataccaggcattaaaatgaggtggcatttggtagattggtggctaatctttattttgccaaagagaaatcagcagaaggtggtctgacagtactctcaggctcactaagcatccttctagattttaagggagaaatctactttcaatcagtttctacgttctcatctgggctccctgactttagagtttgacagcaaattatggatacaactgctgaattaaaaagctgtagaagtttctgtcctccagccagacacacaaaagagcaccatgtctattcagatgatttcagtgtaaatgaagggctcataaaatagaaggcaatctcaggaaataactttttttcatgtccctctttatttcttcaaatgaataattaagattggcaggagaaacctaggaagtattttcgattaaaacatgttttaattagttctgcttctggtgattagaatttgcttaattttacttgtttataaaatttttctgcttatatttaagtacatctgaaaaatctgattataaagttaaaatctacatctctccccagatattctttaaaagaagtgtatttcttcatagaaacatgacgagaaaaagacttccatggcatctttttattttcttcactattgctttaatgcattttaaaattaatctatattaattgagaataaaggaacaaaaagactttttgtcataactagtctttatatttgatttttaaaaaagctcaaactgttattttttccttactacaaacagaatacatacaaaaatttttgcaataacagtatcaactaattaaacattttgagactaacataaccacatagtcattctactgactccgaggaacaaaaaattcctaatcaagatgctctgggttttgttgttgttgttattgttagtattcagatttataattatcatctgccagtaaaaatttaagtgttcaaagttgattatctacaaatacatcactggctctgacatgtaagttctggagttagcatgacagtgactacactgcatgggatgggtacgatacatgtatagaaatcataaagagcattgaatgcctggacttgaaccgttgacttggtatgtgcttcatttggctcactaataaatccacctgtaccaacctcatatcaaaagtcacaaaatatttcatctatatcatatatactctgtagatacacacccatctacaaagcatatatactatacattcagtttttagaaacatgaagtcatattgttttatggttttgttttattttgttttgtttttgagacagggtcttgctctgtcacccaggctggagtgcagtggcatgatcatggctcactgcagccttgacctcccagggtcaaacaatcctcttatctcagcgtcccaagtagctttgactacaggtgcacaccaccatgcccagctaattttttttatttttagtagagacagggtttcgctatgttgcttaggctatgaagtcacattgttgtaaaatgatataccacagatgaacattaatctggctaaaataaatattgtaattgtcatcaagctactagaaacttttgggagttttgagtcaggtgagttacttcccacctgcctaccctcatgcttctgtaatgtcttggtagtctgttcatacaaaaccatttccccttaatgcagttaagatttcttttccaggatgacctgattgggttttggagaaaaaaggggtcatgcagaagaggcaggcatctctcagccactttccctcacacctgctgagatgagtgctgttttctgtctcattggacacatttgggttagaaagcagttattcaaagttctgtgtctgctactccctttggtctttctgtagagcacaaaagtgaaagaagctcctttggcaagaatagccgttttattaaaatgtaactgcatgtcctagctctaaggtttccattctctactggagagtgcaggtcatggatgctgttattgaggtttggtgtgtgacaaaacaggacgaaacagcctaaagaatgctaactttgaaatagtgccgtgggcatgttatttaaagcttgtacatgcatcagttacaccacacacccaggaccagttcactggcaatgatcacgtgaaaatatgacaaaagtttgcaaacacataccaataaggcaccaagaaaaaatatttccagttaatttcagttaattcccagttaacttcaaaatatgaggttgtaccagactcagctgcttaccacttaaaagccagacatgagaggtgagggttggtggaaggaaaagcaggtttaatcagaggcagcaaaccccaaggatggcaaactagctttctaaaataccatcacagatttttaaatattaccatagggtttttaaagaaaaacttgctatgggagacatgtgggagccgtgtggagtgcagcatctgtgtctttgttgcgatggctgtcagggttaatcacccaactggaggcctggttggtgttatcttgactttggccttaatgtgatggactaattgtgactccccctaagcaggagaatttcacagggactccatgccttacttgttctaagattaccttctgacatttcttaagcaagaacataattagataagcttggagggtactctagagagggaaggaatagaggggtgagagggagaaaaggaagaaaaataagaggatgattaaaaagaatttttagaacagtttcccaattacaatgggtgaaattaaaaaaaaaaaaagactcctgaaaatctggtcaactgattcactgagagttcccattactttctttagataacctatttgaattctcatccccttgtctacgaagtgagacattgctgagaatcacgctgtgaaagtgacagccctcaagctgtccatatgaaactccactgtgtctaagtctgtccccacttttacaaagctagctgtaaaggagttgctgtaccaccccataaccttttattttacaagtatttttatgagtaaaactagttttcataatcaaatgcaaattatatggatggaaatgggggtggctgtaaatccagcttctcttccctagggaggctgatggtagacttcagggaagcagatggcctttatctttgtgtctttcagggaatgagggaatagagggatagcagggatgagaattttctttaagtgcctctgaaagttagtctggaactagatcccaaagaccatgatttatactgcctgcccttggggttagcatgttttctaaaactgtcttatttctgagtgaattaattgttgttaggtttagcatgttgccaaaattttttttaaaaatctaaaaataaataaatcagttttatctacttcattccacagtattagggaaccgtgcatcatttctagatttctccacaaagaaaagagggaacacccaaattaggcagcataactgaaggaggcagggcagtctacatacattgtgggaatacatactagacgaggggaaagttcaaggtgaccagagattctcatctgaaaaacagaagaggaactgttgcccagacaggcaatctgtttcaaaatacgagtaaggggcttcttcctcgaagaataaataagataggctaaagttctgtagctatgtgtagtaggttttgttgtggccactgaaattttaattatgattcagaggatgagttgtgtaagagcaggcatatatatacatatatatatatataaatgttaagagcttttgagagtccttaaaactatagtactaactttttccctcaacccccgctgttccccataaaaaatgttcaaattgcctgtggaaagtatacatttatctactcaatatccacaaagtaaaaattgacctaggcttaaacattacttttccaattttggtgtaaattaaatccaaatgcctagactccaggtgtttttccaggtaggtttcctcaaatgttaattgcagtagcaattttatctttctaaatttagcactcactcaatcttggtcattggtattttgcttgctgatgcactgccactctcttgtccagtaatcacctcaaatccttcatgaatgaatgcttaaacaaattttttaaaaaattctaatagcaaagaaatctctgtttgtgtctatgtgtgtgtgtgtatcattatataggctttcaaatatgaatgaaggaatggttgaacagtttagtaaagcaaaccaaattatctaatagcaaagaagttctctgtgtgtgtgtgtgtgtgtgtgtgtatgtgtgtgtgtgtgtgtgtatgtgtgtgtgtgtgtatgtgtgtgctcatcaaaacacaggctttctcagaaggaaagaaacagtgtagtgctagaggtagcactacactacctttgcagcattaacataaacacagaccttaagtctgataagaaacatttacaatgtattctctctgaggcctgcttattgaggcttcctctgcctaataaaaccttggtctctgcaatcccttattggaactcagacattccttactactaataatacctctttcaacaaattgccaatcagaaaatttttaaatctacctaggacctaaaagcaccccctcccccaccactttgactcatcccatccttccagattgaatcaatgttaatcttacatgtattgatggatgtattctgcctcccttgaatgtataaaagcaagctatggcccggcacagtggctcacgcctgtaatcccagcactttgggaggccgaggcaggcagatcacgaggtcaggaaatcgagaccatcctggctaacacggtgaaacccccgtctctactaaaaatacaaaaaatagccagatgtggtggcaggtgcctgtagccagctactcaggaggctgaagcaggagaatggcgtgaacccaggaggcggagcttgcagtgaactgagatggcacaactacactcaagcctgggtgacagagcgagactgtttatcaggccctcccgaagttgttgcatggatgcatcctttaagtctgcagaggtttctgctgccttttgttcggctatgccctgcccccagaggtggagtctacagaggcaggcaggcctccttgagttgtggtgggatacacccagttcaagctcccaggcagctttgtttacctactcaagcctcagcaatggcaggttcccctccctcaggctcgctgccgccttgcagttggatctcagactgctgtgctagcaatgagagaggctccgtggtgcgcatccttaactttggcaaaataaagtttctcaattgattgagacctgtctcagatactttttgctttacaagttggtaaccatagaggattctgagtggaggtgtccctgacctttgacaaatctatcaatgcttggtaccagtttgagctatctccccactccagagaatttttgatttcccaaaatttggtcaagatctgaagtttattttgctgtacaacttcttttctggagttttacttgcttccaaaaagggaagacaagttttctgcttctgtgacaaaaaagtgcaggcaactacttcctggaatttcagctcgctttcaacaaagaaggtgagttgtttcttcctgcttctaggaaaagattaacaaccagctggccttaatttctccttaccattagagtgctcagtaatcatattgttgggtttgtttgttgtcgtggtctttctcccatcatatttgaccaactctacctagtttactcaaatcattcttattctatgaagccagcatcattttggtaataaaaatctgccaaagacatacacacacacacacataaaattcaatgttctgattaacatagacgcaaaaatcctcaacaaaatactagcaaacaaaatccagcaccaaattcaaaagttaattcaccatgattatgtaggctttatatcttggatacaggactggctcaacatatgcaaataaataaacagaatttgccacataaacagaattaaaaacaaaaaatgatcgttttgatagatgcagcaagaacttttgataaatttcaacatcccttatgataaaaaccctcaacaaactaggcgtcaaagaaatatgactcaaactaataagaactttctatggcaaacccacaactaacatcgtactgatgggcaaaagctcaaattatttcttttgataactggaacaagaattcatactctcacaacttcttttaaacatagtgctagaagtctaagctagagcagtcatcaagagaaataaataaaaggcatccaaagtgaaaaaggggaagtcaaattatttctgtttgcagatgactctgtattctgggttctctattctgttccattggtctttgtgtctttttaaaattccagtagcataccgttttgttaactataaccttatagtaaagcttgaaatcaagaagtgtgctgccttctgctttcttctcttcctcaagtttgccctatttggagtcttttgtgacttcatacaaagattgtttttctatatttgtgaaaaattccattggaattttggtaaagattagattcaatctgtagatcactttgggtggtatagacattttaacactaacaagttttcaaatttgtaaacataagatacacaccatttatttatgtttttcttaagatttttatctctgttttatagttttcaatgtacaaatctttcacctcctcggataaatttattcatatgtattctttctgatgctattgtctttggattgttttcttaatttattttggatagtttgttatttgtgtatagaaaaacaagttatgtttgttaatcacgtttacattaatgttttatgtgattattctgtaagtttattgaacttatttattagtcttaatagtttttggtggagttgtaacatttttctatgtttattattatgacatctgcaaacagagaaaattttacttcttcctttccagttttttgctatttaattctttttattgcctaattgctctggtcaggaattgacatactaagttaaatagaatggttgagagtgtgcattcttgaccagttccagctcttcacggaaattctttcaccttattcccattcagtatgatgttggctatggtttgttgtatgtgtcttttattatttggagatatatttcttctatgctaatttgttaagattatttttaatcatgaaggggtattagattttatcaaatactttttctgcagctattgggataatcatatgattttgtttttaattttgtttatgtggtgaatcacatttattgatttggatatggtaagccatcttgaatccctgagataaaacccacttgattataatatattatatttttgatgtgctgttgaatttggtttgctaattttgttgaggatctttggatttttgttcatcaaagatactggtctgtagtttttgttgttgtgttcttgcctgatgttgatattacagcaatactggttgcatagaatgagttgaggaagaatctctcttcctcaattttctggaatagtttctgcaaaatagtttcagctcttctctgtatatctggaaaaatttatgaatctgcctggttttgttttttgttgttgggagattttttttctactgattaaatttcattaaatgttattggtatgtttaggatttgtttcttcctggtttatttttgaggttgtatgcttccagaatttattcacttcctttaggttttctagtttgtgtgcttagagatgctcacagtagtctttagtgatcttgtgtatttctgtggtatcaggtgtattgtcacctttatctttcctggttgtgtttatttgaattttctctttcttgtttagtgtagctagcaatctgtcaattttgtttatcttttcaagaaacaaacttgtcattttgttgatccttttatctttttttgttctcaatcccattggttttgctctgatctttgttctttcttttcatccactaggtttaggctttgtttgtttttgttttttaaactcgttgcagtgcaacattatgttgttaatttgagatattctgttgtcagtgttgtcagaagggcgttagtctcttattgtattactgtctatctcttttctatcagcatttgtttaataaatatgaatgtttcagtgttgggttcatatttagatagttatatcttattgttgaattgagccctttatcattatataataatctcctttgtctttttttactgctgttgatttaaagtctgttttatgtcatataagtatggctatttctgctcattttggttttccatttgtatgatatatcttttcccatcagttttctttgaggcttggttgtctttacctctaacatgcatctcttgtatgcagcaaatgtttgaatcttactttttctatacaatttgccactctgtatattttaattggaacatttaggccatttacattaaaaggtaatattgatatgtgagattctgttgttgttgtaatgttacctggttgttttgtagcaacagttgtagaattgctttataggatctgtgaactttttacttacgtgtgcttttatgatggcaaattttgctctttcatatttatctttagaactctttttagtatttcttgtaagtccagtctaatggtgacaaattcccttagcatttgcttttcttagcatttctccttcatttatgaagcttagtttagcaaaatgcaaaggttttggctggtagcagttgtcatgccatcagcacatcacccatcccatgtgaaggaaaataagacatgttgcataacatggcaatgtggaagttagtcatcatctcaatgcaagtaggtatgagtaactaaggcgccttgcacttgttcctaccagatttttttttatactttaagttctagggtaccatctcacaccagttagaatgtcgatcattaaaaagtcaggaaacaacaggtgctggagaggatgtggagaaataggaacacttttacgctgttggtgggactgtaaactagttcaaccattgtggaagacagtgtggggattcctcaaggatctagaactagaaatactatttgacctagccatcccattactgggtatatacccaaaggattataaatcatgctcctataaagacacatgcacacatatgtttattgcaagcacctaccagcagatttaatgtcattgcaatggaaggtgctggctctcacctgaattgtctgcttctacacttgatggtagtctgctgagaagcctgtttcttgccaagtgctctgtggctctaagagctggagattctttggtttcaaactttcctaagtccagtgcttctggttgagggtggctgctttcagtagcgtgtaggaactacattgcatagacaatcaccattgtttgtccaatcaccatttagccatccagtcagcctccagccacttatctaacaaatactaactgaatatggaatatggaactctttctaagacctcaaaaaactgctgttgacaaggaaagacaaaatctctatttttgcatagctgactttcaattatttagagccactatggttacatttttgaatgtcacaaaacaatttatcagagttacccaggttaaaaactaattgaggtggagaagaactctttgaggaggtggcattttagctgggacagaaggttgagaattcagctatgaggaaagtatgagagagtatattccaggtgacagggaccacaagaacaaagccatagggtcagaaggagcttgatgtctttgaaaaacaaaataaaggccatcgtggctgggttttagtcacatgaaatgaggtagaggaggagattgggaacaagtcttttagggccaaacaggccttggtaaggaatttggattttagtctcatttgaatgagaagtcatcagaggattttacgcaggaaagtgacttaacggaatgtgtattttaaaaagatgattctggatgcactgtggagaatggaagacaggaggatgtggatgaaaactgaggatggttttagtctttcagggcgaggcaacagtggactaaacgcttgtagtggtgatagagatggagagaggtggaataatttgagacacactacactgttttttttttcttttttttttctattatttttgcccaaatctgccattgctgcaactttgggatggaagtctctcagtgtagttcttccttcagtaaatcccccactaatatttcccagggccactctggaagaaggttttggtcagccatgcttttggtaaccagacagcatgcttggcactacagcttagccaggggtctctttcttattacctaaaactatccttattctttagaaactgccacatcaggagagccacctaaagcctttccccaactctaatcaaaccctggccatctccatctcctggttctatttttgctgcttggccaaattcttggggagtccaccaagattgaagccaccaagccttactggcttcaattcctaagacaagacaatgtcccgtttcccagttctagaaaaatgtgtgggattggtccatagtagactgacctatttaatatgcatggtcctgaagcagcctcgagggtcatgggatggcaaagttgtcatcttgagtcagctgtcaactgctcaagctggtgtgtacaggaaggagctgggcaccagacccacattgtctgagaccaacaggaggatgattcatcaaggcaaatcgaggtgctggcaccagcagaagggagaatagatggctggaagacaaatacaacatctctgaagtacctttcaagctgcgactcctaagctttctcttccaggaaccattctgaatctagactggttggagagcctggcttggtcacacagttgactttcttgtcaaggggaaatgcagacaaatgttgttagtgaccaggtctaatctttcagggaagtcttgcaagagcctaacccatggtccacaggtttctgtgcatgcactgtgaacaagcacccactggtaacgattgcatccagagttgtttcaaaaatttccaagaggaatctcagccctggaaaacaagaatgggtttgacccagagttgcctgcattggagataaactttggagaactccccttgttagcgtactaaaatccccacccagggagggaggagctcattcactttttttttttttttttttttttttgagatggggtcttgctctgtaacacaggctggagtgcaatggtgtggtctcggctcactgcaacctatgcctccccggttcaaatgattctcctgcctcagcctcccaagtagccaggactataggcacatgccaccacacccagctaatttttgtatttttagtaaatcgaggttgcattatgttggccaggctggtctctacaattcctgacctcatgatccgcctgcctcagcctcccaaagtgctgagattacaggcgtgagtcaccacacccagcccatttaccattttttatacatgcgaggtatgtggaacatgaccagtgacaccctttactccatctctacgattaatgactcagctagccagcccagtaaaagcccagctttcacctttgttctgggaggcactgcttaaaaactatccatgatgtcctccttacttgccacataaaatccccttgttgaacccgccttggctgtggtcattggacgtcacctgacaagccattgaacccacctgccatgtgggtaacaagatgaggaagagaaccttaagtgatgggtcagattgtctgactgacgatctgaagacctgatatgaagatattttttcaacacataattgtaggtgtctactctggaccaggagctgagcaaggtgcgtgaggcccaaaggtcattcacacccacatgaccttggaaagagcccgtgctcgcctcatggacagagtacagcacaggcacagacgggtgctcagtggaagttgtgagtaaataaatgacagcttagcacacgcattggtctggaagagacagtgaagttaagtgatgaattgaaaaagtgattaatagaaagcgctgctctcagagccctcgcaaatgctcttctcacagccatgcctctgatcagtcactgtaggctcttcctgcctacagaaatgaagcttggttgcttcacctgggaacacaccccagacagaggtccctcgtcattgctggcatcattccccctgcctggcatagcctcctggcctgtggaaatcctactcacttctcaagactcagctgcaggaagctttgttccctggaccaagttccactgcgttgactcctgcctgtgcgcttctgtgttcctgctgacaccccctgtcactctccctgccacctgcattacggaggacccagtgctcacctgcctctcacccaggatctcaagcacttgagagcagaggctggcctcctgcagccttgtccaagaccctcccacccaagacacagacgatgctctcaccaggtccccgctgggcttgactgctttattttactcttggaaacagcttcttaatgtgttggacataagtagccaagacaccaagggaggtcatggtctcttggcagaaaggcttccttgtgccatggctctcttaggcatagaaagctgtctcatcaaactcagtggcaaatctttttgcaactacctgttgccagcctattaattcagcagcaactcaatggcctgtagggtacttgctggctctgtcttgttgccactcatgctgagggcccaccatgggcaccaacatgccagttgtgggcaagacaggatgggagaccagagctgccactctccacagactctgttggtcactgtgtgggatagggagagtggagagggagggtaaagagtgtgtatggctcttctttcccactgcaatgctagtatctctgtaatttctgcagagttattagttgatgtgacattgctactttgtgtttactttaaaatgcccaaattagggtctgttgatgcagtctttcaaatgagattatgctggatatacggtagcagcaaatactcaggctctaatttgaaaaggcatcattatgggaaatattaatgagtgcttgttcttaatcagtatgggctgggctgaatggctctgcagaaagcttcctggattttagagttaagctcctggtctgttggggagagaatagggccaaggagaagctaaagaagagtacagctatgcttcagtgattcacttcactgttatttgattcattaaggttttactggggaaatgcttatcattgaggcttctgggaaaaaaaacattcaggtgattgatgaaatttcaaaaagtaaaagaagaataagatgaagacaatgacaccaggttttgcatccttgcttgcaggaggtctaaggtttcaactcacacactggatcttactgattgaaagcagcaaatatgccatgattgactaatgatgtctgccatgggtgtggaatagacaaatgaagacaaaaattcaaatacctcactgagcagcagagtcttaatccatcaggaaagcctatgaaaaaagaaaaacagtcttcatttacacattttttctctgtaacaaaatatgttttatgttgaagagcggtacgtaatttctactggggttgatcagatgaaaagagagagaaatctgaagctggtggtagccgtcttgcaccaagagaagagaagctatctgaaaatgaagaccaagctattcttttaggcaaggaaagctaccctatagctttggttacatgagcccatttttccctgtttacttatgccaatatgaactgggtttatgttatttgctacccaaagcaccctaatagatttattaaaagagccaagatcacttaatttcttttggctttgagtggtcttacctgtcagtggaaaataataaacttatctgtatttgtttaataggattgcagtagaaaccagccgagacaaaagatgccggagttcttggaaaaatgtatgtgaaatttcaaaaattaaattctagggggatgtgtgtgtgtgtgtatggtttgtgtgtattataatgaagaggacaaggtgatgtgtatttcagataatgaggtagataatccactacattctgtttttgattctggaaacactgatccataaaaacatgctattctctatgttattcctgccacatccaccaaaaccagcaaattctttcctttgtagaatctgcttttcaaatgaggtttcctatatgattgaacactttgattatatatgtatttttgattacctattttcttacagcatcctgaaactttatctgcacttagtaatttattcatgttgcctgcaatgcccccctatgtagcactttgagatgattctctgtggacctggccttcccattgattttgagtctcttatcgaggacctaggtagctttctgtgactccagaatattctaagagagctgctggaacagcagtgctggaagtctttgtctgcactcttcagggttacaaatgccaggtttttctcaccatccctgctgtggtccagcattcagctcctgtgaggtgtttgtcttccatggttcaggaatccttcaaagccactcacacaaccgagattgtgtcccatgggcagggaggagcatcctctgtttctgtcccaacactcaaggtcttttctggtttgagactcaaagatcaagtctacaggttccaaatacaaaaggacatctaatcactcaggaagccaacaaccatggtgattttttttctggttttcacttgaatcttatttttgagatacggatcctttgaaagatcttgaaagatcttccaagaagacaatccacatatctattaaagtcaatcccttcttctgtcatccaaatagaagatggtataccccttcccaggtgcatggaaattccagtatctccaaggactccaggaggaatttcagttctcatagttactgctggctcttttggcctatatcattttcttttgcatcatgcttttgttagtagtttcatttttccacaccaaattgccttgcttaacatcagcctgattcttttgggtagtggtagctgcccagaacatgactgcctcacagctgtgcatggtagacttccctggaagttcagaataatccaagtgtgacgtttggcatttctgcccttaaagttttcccggccatctcttctctctccctccccccaaatccaccttcttttatttttaaaattttgttcacatagtagcctcgctaatcacattctgtgctcaaagtgctttgccttcatccttcatatgcttctcaggtggtgcttctaaatcaaaaagggttctctagaattctctccccaaggggcattgtatatcagctttatcaactcttggaataaattatttcattttcaccattattcttagcatgaatttgcaaaaatttaatgtataacaaatgagaaagcatcagggaaatgtcctgacccatattatgtctggcaaatgttagctactattactggcattatcattatacagagtagatgttttgtatacattgaatcattgaataagcaaatgactgaatgaatgaatgaactgaccatggtcctgggggtaacctaaagtctaggagtgttttaggtagatcaccatagcctctctcatttctccttagttgctctggcttttctcactgaggttgcaaagagacataggggacacatgtttcattagtatcattttgaagatgagaatcaaggcctagaaatactacttttacaaaggcacgtagctggtaagattctaggcaagctgagaaatgcacacaatgtgggctttggcgtaaacttgcctgggttcaaatgccaagtgtaccacttaatcacttccggcctgcagcaaattctcagactccccttagcctcaacaaccttgctggcaaagtgatggttataacagtacttacctcttagaggtgctggacaattaaacaagagtgtccatgtgcagtacatggcatgccctctgcccagataccaagcacaccaagatggggccagctcctagtcaaggacttttttcccacattttcccttcacttcccttcacctgttactacaaagagtggatccatcctgtatcatcacagggaatgttccccctctctttagggactagcccagatgttctatacatcttgggtctgtctgacattgccatcacttacaattatcctgcaaatccagctttcaagctctggcagtgttatgggatatccccccaaaattcatacgttgaaatcctagccctcaggacctcagaatgtgactgtattgggagacagggtctttaaagaggtaaactgaaatgaggttactaggatggaccctaatccattatgactgctgtctttacaggaagagaagatttggacatgacacatacagggggaagcccacagggagaagatggctgtctgcaattcagaagagcagcctcagaagaaaccaacctgccaacatctttatctgcgacttgcagcctccaaaactgtgagaaaattaatttgttgtttaagcatccagaatgtgagactttgttacagcagccctagcaaattaatacaagcagcaaacaaccagatgtcccgcttgaaaacctcatccaagaaatagaaaaataaatgttgtgggaatgatgtttgatggcggggttttattctgcagttgcctacaggaatgacaacagaaaactgtaagacggtgtatttcaaaatgagctctgcagaaaaccagtatgaaaggctctgaaaaaatagaaataataaattttcaagaacaccgagtttgggaaaatttatatactctaatgccctcctacccaccttttaaaaactgtaatgcttatttagagatttgagaagtcccagagaaaagccagcattctgttattacaaagggagatgagcagtctttagcctccacagtctttagcctgcagctgaactggggttcaatgaagcccacgttctgacatctttacttggcagtccctctgtgtctgacattggttcctcccagtgggttattggtcttgctgacttcaagaatgaagctgcggacccttgcagtgagtgttacagttcttaaagatggtgtgtccggagttcattccttcagatgttcagatgtatctggagtttcttccatctggtgggtctgtggtctcgctgacttcaggagtgaagctgcagacgttcgcagtgagtgttacagctcttaaacatggcagtctggagttgtttgttcctcccggtgggtttgtggtctcactgacttcaggaatgaagctgcataccctcgcggtgagtgttatagctcataaagctagtgcgaacccaaagagtgagcagcagcaagatttattgtgaagaccaaaagaacaaagcttccacagcgtggaaggggaccccagtgcgttgcctctgctggcttgggtgcccagtgtttattcccttacttggccccacccacctcctgctgattggtccattttacagagtgctgattggtccgttttacagagtgctgattggtgtgtttttacagattgctgattggtgtgtttataatcctttagctagacacagcactgattggtgcatttacaatcctttagctagacaccaaagttcttcaagtccccacccacccagaagatcagctggctttacctctcacctccagtatgcaaagagccagcagggaagagattgagtttagatgagaaaagaagcaggttgtgcttgggcagccagcagggccctataaatctgcatgaaaatgctgctcagaacagagagggcacatttcaataattagcacatactttaacaccagctcatgtctgtcacagacaggaaattgtaacttctgtgtactgggccgttgttcaaagctgttgtcagggttaacgatgtacctgcttgattattggtagctggaaattgaggttgtgctcacatgtccataggtcttgcattcctcagagctcagagactgccgtgctcacatgagaaagggcacagcatgttagtagaggggagcaaagagggaggctgggagaggaggctgaggccagatgctgcaaagacatggataaatctcaggaggctggacttgctctggcagggagtggggagatgatgaaggacactgaggtgtgagggtggcctttggttttaatcaaaatgaagcccatgctggcatctaactaagataatagcaccaagggaaggaatgggaagccggggagctagaaagcaggtatagtaggagaaagttctgacccaaaggctttgggcagatttgaggaatgtgaagaaatttggggatgaacaggttctttgtggtttgatgggacagacaggaggatgcattgcctgtcacttgatcagggagtcaaaggggagcagggcttggaccaagagaggttctgtattaaatgtcaagtgtttataaatcagggtgagagtccctcttgctgaatctgcctcttttatcttggctgttccacaacatagattccattgtgcaaatgatcatatggacattgtgtgatattctaagccaaaaagtgactctggcagttccagcccatgagtatcttttggcagagttctagtgtgagaaggagttcctgtgcagcactgtctgtctgactcagctctgcaggaacggctggaaccacagagctcatgagggtacactgttcacaggcagggctcacacacgctctgcccccagctcccacgcctgagcaggtcacaccaactttgaggcactaccctgagcctaacatgttttaaaatgtgaatcatgcttcaagtgactcttttgagattggcagggatggaaagagtccaagttttaaacttagtttaagttttaattgtagagatgacaactgacacagatatgtcagaaaaacatgttggaatgtctcgactggcagtggtaattctgtgagctcagttcacattgctctggcctctgacttgtaacatttaggaacctgtgaaacatacaaatctatgcacatgaaaaatccaggcactaagaactcagccttgattagccattaagtgtgctctccgtagaaggggaaaataacattgtaaggaatatgtttaatctttgtaaccaaatccatggtttttaacatggaatatggaaattggtgccactaattatagtcatttttatcagttcattgaagttggctcagcaggctctgtttctcccactcttctctggcaccacatttaattgtcctgtgtagtgtaaggtctgtagaatgaaacagcactccttttcaaatagtgtctaatgtgagcctcagtgatccagaccagactctgcaatgcccagcagcctgggtgagaagtttgaagagtttgtgagaacaacgatgtcttgaatgggccatgaggaacactgcaactctgcttttagatggatttccacttttcttttctgcaagcgttttggagaggtagcatgatgcacttctctgaacaaaatattttcataagttatgttaatggagaaatttcttttggggcttaagtttctacttacctttgtaacatatttttttcaaaaaacaacaagaaaaaaacctcattatcttcctctcccacaatcatagcagtagaaaggagataaggcaagtcccacgtggaccggtggctgggtgtgctgccaggatagataaggcgccccttttacaaacagtctttaacatgcagtcacacccgcaatctcggtgctgggtaataagaataattgtgttcattacacagttgaatacaggaacctatttctgaaatgattattcttgtctagaattacacagaattccaccgagtggcatattcaagagaatttttattaggggaattccaaggagctgcttagtggcagaaagaatttatatttaatttgatttctcagaaccagggtattgtggagaaaggcatcagataaccacggagtgctggttaagggagggaagcctcactaagcagggttcacgcgttcaagccccgcagccaacaagcaatcgttgagactgtcattcgggagtgggcaccaagatgcctcgggatcccagtgaattcatacttcctgcctcttatatccttgcatttggttacagaggtggcacatgctttattactgagcctggttgaaaatcacctctggtcagaccttcacagctcacctacgtgggcccaggacttgtgtgtagagaggaatgaagggttttgtaaaagcttttaccagtgtggagaattctccttttctcattttgctcttgcataaacaaagatctttaaaacagtttatatcagtagaaagttctatgagactactgtgagcacctttgcagaaaaacaacttagcagtaaattctgatgcttgtctgtagtgtgttaatggtggtccctgaaacgacatgtccacgtcctagtctgtgggtgtgatcttatttggaaaaaaaagtctttgcagatgtaactgagttaagggtctcaggagaagcagataatcttggattaatttatgggccctaaatccagtgataagagactcacagagaagagacacagagagaagaggtgagggccattgaaggtggaggcagagactagaaagaggctgccccaagccaaggagcacctggagccaccagaatctgaaagaagaaggaagagttattttccagagccttgggagggagcatggccctgccaacatcttaatttcagcttctggtgtccagagctgtgacagaatgcatttctgttattgaagccaccaagtgtgtaagaatctgttactgcagcctcaggacactatcgcatgttctcatctttaggcgtggggtaagcttctcttcttcattctcctgggctttagtgcaccacagtgtaaacaccacatcttacacttcctcattatccaacaacagtctccaaggctgggatggttgagtctgcaaatcacgtttgagagtcagaggatgtcagagctggaaggggtctcagtctcctcttaaagagaagatgttgggcaagatactcccttggatctgaattctagacctgtcctttcactcatgggctaagtgcttttgcaagaaggtggtagatgtttttttccaggttgtgctagcttggtctagaaagctcccaggatctggttctagttgtgtccctctgtaacctcaccttccacccccacctcccggatctccagccacaggaacttttctgaacatgttctgatcctgctgttcatatgcttttctccacaccaggctgagagagggacaaagcatcctttaaacccagatccctgtccacaggcctttccctgatcctccaggtggggtcgctcttcccccgctccctctgtgcattgtatgcagtgtgtggattctaccacactctagggctactcacaaggcccagcagacctgcagggtctgtccccaaccttcctcctagagtgacctctcatcacttcaactgcagcccctcagatgcaccaggacccctcctgccatggggcctttgcagatgctgtgctttccctaaagtcctctactcctctttacaatggccttggattatagttaaaatgttccacatctttgttgggattaattgttcaatgtctgtgtcttcactgggcagcaagctccatgggggcatagattatgatggattttctcctagtatagagccccagcatgtagcagatctaacaaacaaagacttggtgactatatgttaaatctatgtagatgatcctccatgactttatgagctcctcaagggtagggtcttcttaattttatatctctagcatttactacagagcctaagctcaggtactattttggttagcattcattggctaggtgaacaaaattctccttttctagagtttagttttctcaactagaaaacttgggaggtagacaagttcagtattccttacactcttttttaaaatggtcatagcttcttcgatggggcaaaggtcccctttttttctaagctaacttgtcccacttaccagtaaaaaagtaacaagccaaataacaacaaagaattggatagaaatataataatttaaaatattcactcatgcttttttttggctggcaaccctcttgttctttttgccttcttttttttcttccattctctctattaattgtcagattcaaactagaccagagttttccatcaccttaaagaaaaaattgttgctgcagaaaggcaaagagaaaaaaaagtcagttctcacctctcaacttcaaaccagactattgaaaccaatggcttggtgtcaccaggggcccttctggaagcagacacacagagctgaaattgagagtttaatgagttaaggagctatttacagagatttgggccacgttcagggtaacacatagccactggcatcgggacgcctttatcaccttaagctagaggagtgaaagggaagagaaagtgtgttaggttgtccttgcattgctataaagaaatacctgaggatgggtaatttgtaagaaaagaggtttcatgggctcatggttctgcaggctgtacaagaagtagagtggtatctacttctggggaggccccagggagcttttactcatggtggaaggtgaagcaggagcaagagagagagggagcaggtgccacatacttttaaacagccagatcttctgagaagtcactcactatcaccaggacagttccaaggggatggcactaagccatttataaaaaaaaaaaaaatcacccccatgatctaatcacctcccagcaggcccccctgtgacattgggaatcacatttcaacatggggttcagatggagacacagttccaaaccataccagaaagcctagcagaaaggactgcttggcaggagctgtgacattcagccggggacccagcagggatggagctggaggaagacatgcccctctttgtgcttgtcttcctttagactctgctagggccacccttgcctaaactcatccaggaaccaggaggcaagggagccatggataaagcccttgcagcggagccacccagagcagagtgaggggcaaagcgaaggcctccagaatggaccaacactggcttcagagaaggaagcttagaaggacctcagcaatgcatttatgccacagcaataaatgtgggaaaaacataataagaagttctcagagccagttttccctccctctcccatcttcatccctcaaaacagataaagacccttgaaactggggcaaaggacaggcattcggggtggaaggtagtgggtggcagggttgaagaagcccactgagggctctgtcatactgaagtaaaagtgagactccactctagaggtgaggctcagacactggaccaaattaaggactggctaaaatagggcctgggcggaagcagctttccataagacatacccaccagtgtgccacatcagcttaccattaccgtggcaacacctggcagttaccgcccctttctatggcaatgacccaataacctcaaagttaccacactttttctaaaagttcctgcataaactaccccttaatctacatgtgattaaaagtgggtgtaaacatgcatgcagaactgcttagaggtgctgctactctcagtgcactgctcatggggtagccctgctctgcaagagcagtcgtggagctgccacattgctgcttcagtaaagccattttctgctgggcgcagccaagaaccctcaaaggctgagccccacttaagggctcacctgccctgcatcaatatcccctgggctgagttccttaacaataaagaactgaagccctagattaacgccagaagctgagtgcctggggagcctgaaccatacttccagtggagcctagggaaccaacaagtctcctgagggcctccagcaccagcagggtgtgtcagcatcggagctgtggtggagtctaatcaaggcaccagagccccccagcccatgtttcctgcaggcccatgcagggcaggagagatccctttaagttccatgtgtttcacctgtgtacaccccaagaaggtatagaggttgctgagaccagaggtcagggggaccatggaggtcactcagcagatgtcaacattcacagacaatgatgcttaaaagccagaccgcacacatgagcttcttgaagttcttctgcaacttccctgaggaggagaggggaaaactcatgcaaagactgaatttactcatttactaacatgaagtttcagctctggtagggaagggaggttgagagagaaactaagttcagctatagaaacatcaagctgtgtttctttcatgcacacctgagttgtggccctgttcaatagacgtctcctcgattggatcaggtgagcctttgtgtggcccagcaaggcttcagaactcacttgtaaaagtatagaaaggacaggtatcacaagagaggggacacttgcctggcctccccatcctttcctctgtcatttagcttttgtttggaatatagggtaagtaaaaagattaaaagccccacatgaccttggaacttcatcacttagatggtagagagactcataatacacaacatgcctttgaaaccattttaccctctggcctgtgtcaccgggaaaaatctctctcattgttctgctggcccctggccataggcccacaccttggaatcctagtttccagtccactgaagctggttgataataaaaaatgaatccattaagtttgtacctgaattttttcctgcaagcatctaaggaactgataccatcttcttaccaaaaaatatctcacttctactgcatttcatcagagttacaagggattacagctaagtctgtaagggaataataaaatgcaagaaacggaagatcatttagggctgagagatgagttaattcagataagaaaatgaagacccaaggagaaaaaaattatttcccaaagaccaccttctaagttaaagacttaaatcaggcctcttgattgaaagaccaaagtcttttctttctgccattttgactccccacaccaccacagtctccatctacatcaggaagttatggctggcaccttccacagatggacctgagtactctgtctaccccaggccccatactcagcactgggggattacatgaggaggaagacagacctggtcgctgcctttgaagtgtatatacctgcctgcattgaactggatcaagagtcctgatttaggttatttggagtggctggtgcattccaaaagcatctttcttagcaagctgagaccaatcaaagggttgatgcccaaatctcatctgtgcaagcatgagaagacaccatcagctttggactttccatgtcctggttaaaaccagtagacaatttgtgcctccctaaatgaagaacttagtgagtggttggaaagatggctgaagccatcattggtgtaagcattgtcaagggcatgcctgtatggttgcttgcactcaggctgatgtttagtgtaacattttaaagatctgctgggagggaggcttcggggctaaatgatactaagagtccacctcaggaaaaatgctttggtagccgatgaggactgtgttctgaaaactcaaccactgcactccccacgccctatgcacaggtttctatgggacccttgagtcctccacacctgccagtgcaggcagccagggctttccaaccccacaccccaggaaaagggttcctagataccagagcaaagaaaggcagtgtgggatttatagcttcaaaatagtctttggatataaagagtcttgatttgtagagacaattttttgatgcactaaagtctcaagaggcctggcatggtggctcacgattgttattccagcactttgggaggccaaggtgggaggatgacttgaggccagggattggagaccagcctggccaacctagtgagactccatctctacattttcttaaaaaaattagccaggtatggtagcatatgcctgtagtcccagctactcaagaagctgatgcgggatgattgcttgaacccaggagttcaaggctgcagtgagccctgattatacaattgcactccagcctgggcaacagaactttgtttcttaaaaaaaaaaaaaaaaaaaaaaaaaaaaggaaatcgttatcctttaagagtttctccttgccctttagatgagacactaacttctactgcatctataaatccccacatcccctctcctcagtttccaacctcatctcctgcactttccctcctgccagccctgcttggcaaggccttcagctcctcacacacaagcctctgccctgcatggggccttgtgcagtctcttccctcccttggaactcttccacctgcttcccctgtctgtatttgtcctctttgattcctgtttcagccttttaatgtcacttcctcagagagagctttgctgatcttccagtctagctcctggttgctagtgacttcccctctagttttcctgcatggcagttcatgaaactcttagcatgcttcagcgcgtgtcccttctgttaaatgcctgccttccataagctcgcgaagccgggcagaacttgacggtggctctctggtttcaaagatctccacccttgtcactacacaatgctcctgaagaaatgaatctgaaagaaacaaagaagcagaaagtatacatcaagcctatgtggaagagggccactgtaatgatgtctgaagctcctgtgggcctctccctacctggcaggagaagttcactgtgcctcagggacctcagggaggagacagggtgctgagcatggctttggtgtgaccctgggatgtcacccaaccttgttcctggcccatccacagcccctgcttgccatagagccaagtagcttccttatgcagtaggaactcttatccccatttatcagagaagcaagccaaggtgagcaatggacagacctggagctgccagcatgatcatgtgattgcaaaccctgagctccttccaataaccatgtgtcttataaataacagtgatggtgtgagctgtgcccagcaccactgaaaaacaaaatgccctagagacagtaatgtcaaatggagagacagacaggtagacagacagacaggtaatctcccctttgctaccactcaggatgttgcttcctctcagtctatttcccaaatcctcctttccccgcaccccataatcttgtcagggcttacctcctccctatgctctgcgctttcattaatttttttatcacctatccctcagctgtaatctaggactttgtagggacaattaattaaagtgaggaggttcttaaaaggaggtattgacctgcaagtcagccctttctgtctgcagaattaatcttcagattacgggtcaagaggagacatctttaaaaaagtgcccagccaatcgatttttcagatgtgttcaggaagtctcaacagctgtgtatgaacccgattgcatatcctgcttactgcctaagaaaagcataccccactgagtacacgtgagagtgcagcttgtttgaagaatctgttgctgtagaaggattaaagggaagacaaagataaaatgtgtattttaaaaagcatctattgatctatctatctagctatctattatatatatatttccggtcctcaatcctgggcagggtgtgtgctgtcagagatgggcaaggatgggtgccagccattggagagctgttccagggagggagccggaccttagccagcccaggcagcaccagagaaagactcatccaacactgaaatagacggccccagtgtgcgcgttacaatagcaggtgagtaaaactgtctattgtacacatgcggatataggagctttgcaattatctagcctaatgtgcagataaggaaatcggggccctggtaggtacatgactttctcagtcttgctgtgtatggtccattccccaaactgaaattcaggacctctgacacccaggctgggctctaagacatgctgccatttctcaggggagcaattgagagaagcagccaggcattttcctgtctgaccccaacaccagggttctaatctcccttaagctcacacagcacctccccaaccacttttgtggagagaacaaaaagaaagatgtcgatttacccggagagcatctgtcactaatagtaacatgcggccttcactgagggttaactgtatgcaggtgtcgttcttatcttcttacaagtattagtccatttacaaataaagtgtgggaggcttagaaaggtcaagtggcttgtctaagctcacagagcaagtcaaagctggaaccagaattctgggattagtcctgtgttgcaacaattctttattgcctcaacggacaaggtgcacatcaatttgaattacttcagctaagctgagtgacttgattcctgttccttacattgatgaggatgccaggcctgtgcctaacccttatcaggagctggagagcacaaatgaagggacaaagagaagtacacggtagccgagtatagtgaacaaaatctcccgcttaggtcaaacaggggcacggttgtgttctgcctcatctcaagaaaagttaggacctaagctccatgatcatcggttttctcatctctaaaaccggcataataacattcaccttttagggttcccagggatcttggattagtctgcacacatttccaggaacattccaggcacctggggagcagtacagctccttcaggaggtcctcgatcatcatgaacagatgttagtaatcatgactgacacagatgctgcctacgggatgatgacggtggtgatggtgatgataaagttgtggttacgctgctgctgtgatgatgggataacagtgaggacacaagaaagaacacggctctgccatgtcaggaccatttaggtcagtggttccgaaccaggagtgatttcacccacaggggatgtttggcaatgcctggaaacacttttagttgttcacactgttgggggaggtgctattggaatccagtcgtgggggccagggaccttcttaagcaccctataatgcataggaaagcccccacaagaaagaatggtccagccaaaatgtctgtggggcccaggttaaaaaaccctggtctaggaggacagaaaacctgaacactggaagtgagagattgaagcttccaggagccttgttgactacttaacaaacccctttcagctgctgctttaaaccatacaggaatctgcaccttaaaggaagagggcagagttgttgacagtcaggaagactatggtgaagccgttccatgggacctcctccctctatttgccgggcagcctggtgcagctgcgtccccggcccctccaagtccacgtggaaactgtcccctggttgtctagatgtgcaaaagggtgtctgcaggagcagtcttgctctcccaagcctctgacactgtgacaggtggacagaagcaggagcgggaggaggaggggagaggaggaggagagccacccataaatgaaagaacaatggagcatcgatcagcactttttcacagcaggggagctgctttgctgagccccagcactgtcagacagaccagacccttgattaaacctgtgcaactgctggcatggatggccgtgcttagctcccatcagcaactctgccagaaagaagaggcgccacagaagttatgaaggggcccagggctggcagctgggtatctggagggctggtaccctcttccctccaccagagctggctccaaatttcagactcaaagcagaaagtttattctgtatttttccaggagatggggctggttggaggtgagagcacagggaaggctagattccctgggaatcccctgttgttttcctctctgggaggccttggtgtgcaggttccagacactgccctagttctcatcatagggcagggacacggggagtcctcaccaaattccaaatgcctccacagagagggaggctccgtgtggtgatgaaacctgctctgttcatttcgtcatttggaattctcttggatggcctgtgagttttctgttatagaatcaaaaaccacattttcttaaaagatgacagactgtggtctgttctgcctgagacccccatgtgatgccagagaagccacaactcgcaggccctgcatcacctgctgctgtgtgcagatgaggaagtctgtcttcctggagggggttcttatgagcacaaacagtgacgaacgacgttaaatgcatgatgaaaaactaagccaccacagaaagccagctgctcaccccatagaggcacagaaagctggctgctcaccccacagaggcacagaaagctggctgctcaccccacagagggagagcactttgtggatgatacctgatttttttctttcttttctttcttttcttttctttctttccttttctttcttttctttttttctttctttctctttctttcttccttccttccttccctcccttccctcccttcctcccttccttccttcctttcttcctttctttttttgacaaaatttcactctgttactcaggccagagtgcagtgatgggatcacaactcactgtaacctcgacctcctaggttcaagcagttctcctatctcagccttctgagtagctgggactacaggtgcacaacaccacacccagtttatttttttgatttttggtagagggtgttgctgtgctgtccaggctggtcttgatctcctggcctcaagtgattatcccaccatggcctcccaaagtgttgggattacaagtgtgaccgccatgcctggccaagacctgcttcttaatcattgttggattcacagagcttcacactgtgccatccatggtaccatagagagaaaggaaagcacttgtaaatgtgtatgttactgcccccgctacctcccagggaggtgaatccctcatcaggggcctctgctgagtggatgatgggtatggagatgggagggaggggaatccctcatcagggcctctgctgagggggtgatgggtatggagatgtgggggaggggaatccctcatcagggcctctgctgagggggtgatgggtatggagatgcaggagaagaggagttggtacagagctgaattgtccaacatacaacagagaaataaatgaaaagtaaggcagtggctaacatggggtttgggtggggccaaggaaaattgagtagctggcaggcgggtagcaggaaaggggaacgacgggggctgcgatgttacagggtaggttctgaagttgtctgacaggtggtgagtgatagagacctttttcttgatctcccagtgaaaactttagtaatcacacgactgccacttttgtaaaaggggcttgcatttgggggctgcaaggttggcgcaaggttagatccggggttgcccgtgggagacctgccacagccaggctgcatgggaacagagcactcgcttcttctcatggctgtgctggtgcatggcagcccctgactcaggtccacagtctgacactgccaggttcaaggttggactttacccctggcccagatctcccacaggctacttattcctatctccttccaaattcagcaactcattacaccaccttgaagaagatggggcagagcggaggggaggctagagggacaatcccaaaaagagccctaaatctacatcagattttccttttaactaaaatctatttggtattcagcagaaattttgagtctagtgtttgacataatttaatagtgtgcattaatgactataattttcccctgtagtcgagatactaagaaaatgagacgtgcttcatctacaccacacacaacagtaaccaggacagacttggaaatgacagtaaagaacaaagtccgtgagggccaacagcttgtggggaacttcagagacacgcagcactccacatagaaagcacattccactccagttgtaagaaggtttgagcctccctggtatttgttacgttcttttacgctgactacatttctgtgtggtgagtaaaaccattctcattgtgcaggtgccaaagctgaggccagagggattaggagatggtatatgtccaaggataacattaagatgttttaagttcagtttattttattttattttattctttatagacagagtcttgctctgttgcccaggctggagtgtagtggcacaatcacagctcactgcaacctggaactcctgaactcaggcaaaccttcctcctcagcctcctgagtagctaaggctacaggcatgcaccaacacacctggctattttgttattattattattattattattatcattattattattattattattattcgtagagacagggtcttgctatgttgaccaggctgatcttgaacacctgacctcaagcaattcttcctcctcggccgccctaagtgctgggattgcaggcctgagccaccatgccagtccataaagttttattttaagtccttagatgtgggatttcctttttagagcagcaagtactacctgaactaaaacaggtggtcttgcaacttgcaatggattatggaaatagatggcatctatattggtgaggttctcaccaaaactcaaacagaataaatgtcatttgaagaacaaatctcaactttaactttctttcatccatgggtaagtgctacatttttgaaaaaaatatgaatttaaataaaagtaatttattgtggtgagaatatatattacctgtcacgaaacatgtccttctgtatgttaacttacccaggcaaatgaaaactttagtaaaaacatttatgtctatatctgtcttctaaactacacctgtgtgtgtgtgcatgtgtgtgtgtgtgtgtgtgtgtttttgaggggttcctactttctgatgtacaggactctgaggcctgaatagttcattgccataaactgagttacttcttttggaaaaacataaattttgttattttagtcttctttaactttcatgtgtttgacttgccttaattatatattggtagaattaaatgtttcatgatcagaatttggacttttgcacatgagtccacaagtgttggaagctttctcaggtgcagcaatgccaatctccaaaaggtccaactcggtaagccagtgtttgtgccactatttatgtgtttgttattttacgcttcaaaaaataaattagaacagaacagaaaaatgatactagtaacaaagatgtttgtcccatcactgtaatataattaagaccgagatggaatggatcaatgagctgcatgcgtaagtctccatctcaaatagactttcaaatggttgcattataaaggaaaaaaaactagattcaatgaaatgtgttcaatattatgcataaaaggcacaatgtattcagatattttatactagttttcggcttctggcaacagagcacatccacccagctaccaccacagctaaaactataatactatttgttttatgatgtcttttatacatgctttcaagaacacattatatacaaaataggtgtttctaatgtgcttcacttttcctgtggcctcccagaggctaaaagccacatttgtagcacagttttcatgaccgtagaggccctgaaggcctgaatgtcatctcttccccactgttcactccttttactggtgttataccccaactctatggaacactattaaacattttctttggctccaatgttttaaaactcaattgtctttgttcagtatgaatttgtgatctgtgtcaaatcctcgtgttgtgtagtgaggtggggaacaggtgaaggcataggggttgagtaaaatgctgagcatgcaacaggtgctgggcaagtgaccgtgaatgctgggaggacccttctgcctattcttccataatggcagaagtggacaagcagacattagtgtacagtgagaccacatctatagcataggtgtgcacaaggtgactgaagacctgggagaaggatgtgtaaaccagcaactagcgaagggctcttcaatagcaaaactcaaagcatcccttcggcatagaatatcaactatctaaggagtaaaaattttaagttgacttttgggtctggttcagctgacagagtgagcatgtatttatttcctgtagtggattgaatgtttgtgccattccaaaattcatatgtttaaattctaaaccccaatatgatggcattagaagatggggcctttggaatttaatgagctcatgaaggcttgaggtggatattccattctccctttgattttcctaaatattgcccacatcttttaatatctgtctccttatccaaatttgcccaattacatagttaagggaaccatctgagacagataaactctgacagagagtgcagaatttcaaatctagaaattcgtactcttctaaactactaagagaataagaaataagatgcatgtatattatctatggttataaaagtaactgaaagcataactaaaaataaagttatactgttaagagaatgtgtgaggaagagatgagagggtctagagaagtgcaaagagctaagctatttgtcttccacattaaagttaggggaaaaaaaaacttttatctgagaaatgtgagccctttcaaattatcaggcctggagagacataaaaatgagacagcaatcatatcctactcctgcttttgagctatgtatttacctattgaaatggcttgctattgtcacatgcagctatgaattaacctaataatgcctcaccagacactatattccacaccccacagtacaacaatgtatagctgatcagtgatcagttttgtttctgtaaaccaatgagaattcctgacaggattttgcacactccctttccccctttcttttcttttcctttaaaaacatgcctgtaacaaaggccgaacaaagctcatatccaaggttacttgggtctgagcctcctgggcagcttgtccttattttagcatgcgagctgaagactcacaaggctcacaactttggaaaggacacctttatttctcataaagggctgcaccctgcaggctggccattccacaggctgagaagcatagcctccagcagaagcccaaagcttgagggaggtgtgaagggaacaggaatttatgctgaacaggttggctaaatatacatatttaataagctatagaagatgtcatgaatatctgtgaaaggagaaacaggcacatgtgcaattgagcttcatgcctcttcgtgggtcacatattcaaaaaatggtgatcttggcatgatctaaggagtctttggccctctgatgtcaaaaagtgacaaagaggggaacacaaaaactctcactgagcatcctccacaagttggccaaaactagtccagagttggtggtcagtttttaggaaggaaagcattgtgaaactgctgagctgctgtgccaaacgtgcagagaggaaaggagagtccagttgtggcctcagatgactggctaaaggtgatagaaaaatgagttgtccgtttcttgctttctagagctggtttctgcctactccttaggaaagaattctggttaaaggttaatgagaaagggacttactgaggcgtgtctgacctcccatcccatcacagccaggaaaactcagtttttaaggtttatctgggatcctcctggctgtttagtccactgggggacttaggattttatttttatttctcagtctcaagtaaactgtttaaatctcactttgtgtttcattctcttctttttaagtggacaaaagagaaaaaaatagaagaattcctagaatttacatttattcagtaagcagcagtgtcaatgcttaaacaattatacagtaatactaaaaagttcctttctgcaaagctgtggttgagtgggtaatgaattcctaaatgctggaaatgacaagatgtgtaaaactaccctctgttttttaaatatttggctagtccttttctcccacaagcttcctttgtcccatgattaattattctaaaatggttgggccatttctccagaatatagaatatgttagctgtcattaccacacacttgggaaatggtagcattcgagtctcttgcctgagcatggctgtgagaggtattcagaggatgctgtggggagataatgttttggtttcacgatcaggaactaaaatccagaaggatctcacacttcagtgcattccaaggcacccctgttgactattgtatagaggatcccaaaagataacagccacctggagaaggaaagcagctcataacagactgagctgtgtgtctttaaaaaaaaaaaaaaaaaaactcacttgtaactgctactaatgagagtgtgtattcagggcaacttgaatctatgctcccaggtggccatcttcaagctcaaataaactctatacttaatcataatttctgaatctcgttgtttaaggttggtacaccacaatggcctagcatcctcctgttccatgagcaacagacaccattcaaagggctcttcctccaatatctagactctctttgtaccagcaatgttaactgtggagcaattatttggtaattaaacaaccacagcagtgttattagctccacactctgaatgacatctttaagcctctctaatgtgttaagcatgtctaatgtgtttttccacttttggataacttaagagaccagaatatgccatctcaaaatatacccctttggcataagcattattttgagccaattatttttgagaaacagcagacaccagagaaacagagtagaagttactcttttgcaaggaagacttacttctatgatgaaaattttctttcataagggtgccttcctttcagcactaggatgagaaggatggcttaatcacaagagactctcatccatagagaaagctctgacttaaatctgcataacaaacttcaccctttgtctgccatgcttttcctggtcacctttccagaactggcctcccccacagcctcctttctttatttcagatgaagatggtagtaaagcctgaattctaagccttttttttttctatttttttttttttttttttttcagattttcccgcttttcctgagtatctcctatgtatacaaaaggaatacatgttgataaacttctggtttgttttgttctagtaatgtgtctttttttttaacaagggatcctagctaagaccttagaagaataaacaaaaaattactttttcaacccctgcaataatcaactttattgggataaagattcatatttattgcaatatgtcttatctttatggaaattcaaaaagaattcaatcacagaatcaaaattccagaactgtacccaaatattagtgaaaatttagtatacaataaaagcaacatctcaaattagtggagaaaaaatagaattattaaaaagtagtgttggaaaaaccatataaccatatagaacaaggtaaaattgaatccattcattacaccctataccaaaaagttctaaatatatcagatatttaactgtaaaaaaatgcaacaaaacaatttttttaaacttgataaatttttctatcatctgggagtgaagaaatgttttcctaacataaaattttgaaacataagaaaatgtttaataaatttacataaaatgtttaaaatcttagtataataatgtcagaggcatttgaaccagagtgactccatcttgagtaagctctggataaaataaggctgagacctactgggctgaattcccattcttagtcacaggatgagctaggagattggcacaagatacaggtcataaagaccttgctgataaaataggctgtagtaaagaagccagccaaattctaccaaaaccaagatggcaatgaaagtgagccctggtcgtcctcactgtttgttatacactaaccataatgcattagcatgctaaaggacactcccaccaacaccatgacagtttacagatgccatggcaacgttaggaaattaccctagatggtctaaaaaggggaggaaccctcagttccaggaattgcccacccttttcctgaaaaactcgtgcataactctccccttgtttagcatataatctagaaataactataagtatccttagtccagcagcccaagctgctgctctgcctatggagtagccattctttattcctttacttccttaataaacttgctttcactttactctgtggactcccctcaaattctttcctgctgagatccaagaaccctttcttggggtctggattgggacccctttctgggaacaatagaaaaaataatctaagtaaatggttaaatggcaaaacagaataaattatttgcaaagtatatttaaggcaagggttaatacacctaatacacaaagaacttttttaaatgttggtgcagggaaccaattactttataataggctaagattatgaacacacatttcacagaaacataagcacaaatatctcttaaaatattttgaaaggttaaacctaacttataacttaaaatgcagattaaaggtgtactgagttgtgtgtaaccagacacaaaaaatctaaaagcttgatgacatatttggttggtgattctatgagaaataggccctctgataaattggcagtgttaagtgcaacatgatacagtgaaggaaaattcagaaatatccatcaaaaccatgtatgcatttatcctttcagccagccatcccacttctaaagatctagcccaaggatgaaccgagaaagaaaagaaaagaaaagaaaaaaaaaaacatgaaaagaggctattcactgcagcactattagaaatagcaaaatctcaaatgcctaccagtagaaagttggttaaatagagtagagtgcacaacacaactgagtaccatgcagctgtgaagaaaaaaaaataagagatatcttcatacactatatggagtaacctccaggctatagtaaaaagattcttcaaaaggaaaataatgtgctagtacactatcatttactaaaacataaaattacaaaaattcaaaaggggtgaagaatatatatatatatatatatatatatatatatatacacacacacacacacacacaaacacacatacacacagatacatatgaaggtgtgtgtatatatatacacacatgtatataatgtatgtacgatttccttatattaaaaaaaggaaagataaaaatggttactgtatctgccaactgtaactgcaataatggcatgtgactttattagtctcttttcatgctgctgataaagacatacccaagactgggcaatttatgtaggaaaaagggcttaatggacttacagttccacatggctggggaggcctcacgttcatggtggaaggcaaggagaagcaagtcacatcttacatagctgtcagcagacaaagagagagcttgtgcagggacactcctccttataaaaccatcagaactcatgagacttattcactatcatgagaacagcacaagaaaaacttgcccccatgattcaatgacctcccattgggtccctcccacaacacatgggaattcaaaatgagatttgggtggtgacacagccaaaccatatcatttcacccctggcccctcccaaatcgcatgtcctcacatttcaaaacccaacatgccttcccaatagtccccaaaagttttaactcatgtcaacattaacttaaaagtctacagtccaaagtgtcatgcaagacaaggcaagtcccttccaactatgagcctttaaaatcaaacacaagttaattacttccaagatacgataggggtacaggcattatgtaaatacagccattctaattgggagaaattgggtgaaacaaaggagctacaggccccatgcaagtcagaaatccagcagggcagtcaaatcttaaagctccaaaattatctcctttggctccatgtctcatgtccaggtcacactgatgcaagaggtgggcttccatggtcttgggcagctctgcccctgtggctttgcagggcatagttcctctcctggctgctttcatgtgctggagttgagtgtctgtggtttttccaggtgcacaatgcaggctgtcagtggatctaccattatgggctctggtggccctcttctcacagctctactaggtggttcccaagtaggaactctttgtgggggctctgaccccacatttcccttctgcacttccctatcagaggttctccatgagggcctttcccctgcagcaaagttctggctggacatccaggcatttccatacaatctctgaaatctaggtggagtttcccaaacctcaattcttgacttctgtgcacccacaggctcaacaccacatggatgctgccaaggctgggggcttctactctctgaagcaacagtctgagctgtaccttggcctcttttagtcatggctggagcagctgggatgcagggcaccaagtccctatactgtacacagcatgaggaccctgagcttggcccatgaaaccattttttcttcctaaacctccctgcctgtgatgggaggggctgccacaacggtctctgacatgcactggaaacattttcctcattgtctttgggattaacattaagctgccccttacttatgcaaatatctgcagccagcttgaatttctcctcagaaaataagattttcttttctattgcattgtcaggctgttaattttccaaacttttatgtcctgtttccctttcaaaactgaatgcttttaacagcacccaagtcacatcttgaatgctttgctgcttagaaatttcttcccacagatactctaaataatctctcttaactttccacaaatctctagggcagaggcaaaatgctgccagtctctttgctaaaacataacaagagtcacctgtgctccagttcccgacaaattcctcatctccatctgagaccacctcagcctgataatgattgtccatataattatcagcattttggtcaaagccattcaacaagtctctagggggttccaaacttttccacatttttctgtcttctcctgagccctccaaactgttccaacctctgcctgttacacagttccaatgtcactttaacaatattgggtaacttttcaacaatgccccattttactggtaccaatttactgtattactccattttcatgctgctgataaagacattcctgagactggagcaatttatacaggaaaaatagtttaatgaacttacagttccatgtggctggggaggcctcacaatcatggcagaagggaaaaaagagcaagtcacgtcttacgtggatggcagcaggcaaaaagagagcttgtgcaggaacactcccctttttagaactatcagatttcatgagacttattcactatcacgagaacaacaccagaaagacctgcccccgtgattcaattacctcccattgggtgccttccacaacaagtgggaattcaagatgagatcttggtggagtacagccaaaccatgtcttgacaaactaccttaaattcagtggcttaaaagaatagccactgattcccatgttcccaggcctgtgggtcacaccaggttcgtcttctttctttgagatgtgagtctagggtcaggaggggcagctctgctttaggctgtggatcttcaaggcagctggtgtaactgctcatgtgtctcacttggcaacccagctgaaagactgggctaccagaaatgaaactgcctttacaaagatgatgacagtgaaagaagtctagcatggctgactccatcttgcttccagcctcagagactggttgtccttgcttatgcctgggcagaggtcaagctaacaacaggaggaatttagtttatagttaaactttgaaggaaggatgaaaatagtctttccctaaaactgatccctccttgtttaggggctgaaaccacctttgtaaaactaacaaaaggccacaagattataggagaaccctgaattctcctactatgtagttgtagtttctataattccttatcgcccaggagtcatgtggccagaggtcactagatttgtaacttccccagttgctcctacaatgctattatagaacctaagattggtatcttgacacattttttagacttttgcattctggcaacagactaaccccacctggacttgcgactcatcactcaaccggtcctatggcccctacccagaagcagacacagcacatgaggactgttttccacacccctatgatttcacccccaaccaggcagcagcacccattttctagcccctgcccaataaactatctttgaaaaaccctaacctctgagccttcagagagactgtgtaaagaaatataaataaatcaatggaacagaataaagaatccagaaatagatccacatatgaatgatccaatgatgttcagccaagatgctaaggttattcaatggagaaaagatagtctaatggggaaaagatagtcttaacaacaattggtgccatatccatatagaaaaaaggaatccttaatctttacctcacatcatataaaagataactcaatgcatcatagacattaatttaaaaactaaaactataaacttctggaagaaaatatagggaaaaaatatttggaacctcggagtcagaaagtttttttgatagaaaacaaaatgtatattttagaaatctgctttttgaaagacacgtgtgatattggtctttaacctggtttcctgacatgcaactccttttgaagattataatcttcaaaatgatgtattttgtttcatattgagttgagttgtggccagggaaccgtaggtagcttcaggatgggggcagttaccagaaagaccaaggcaagattccagggtcaggactttcaaccgcacccctcaaccgctgagaagagaagaggagctgagggttaagttcatcaccaatagccaatgatttaaattatcatgtctacgtaatgaggcttccataaaatcccaaaagaacaaggtttcgtggccaggcgtggtagaggccaggtgtgatggaggtcaggcatggtggctcatgcctgtaatccagcactttgggaggccgaggcaggcagatcacctgaggtcaggaattcaagaccagcctggccaacatggtgaaaccctgtccctactaaaaaatacaaaaattagccaggtgtgttggcacctgttggcgcctgtaatcccagctactcgggaggctgaggcaggagaatctcttgatcccaggatgtggaggttgcaatgagccgagatcgtaccactgcactcaagccttggtgacagagggagactccgtctcagaaaacaacaacaacaacaacaaagaacaaggtttggagagcttccagacagcagaacacatggaggttgctggaggacggtgcacccagggagaatgtggaagctccacacctcttccccactgcctcaccctatgcatctctttctctttattctttgtaatatcctttataataaactgatgaacataagtgtttccttgatttccgtgagccactctagcaaattaattgaacctaaaaaggggattctggaagccctgatttatatagctagtcattcagaagttctgaaggcccgaacttgtgactggtgactgaagggtgcagtggtccccctcacaggctcagtgactgagctcttaacccgtgagatctaaactgtctctaggtaaacagcgttgaatgggaggaggcccagctcgtgttcactgcaggcttgattgcttcctcattggtggggagaaattcccacacatttggtcacagaagtctttgttgattattgtgtgggatgacagcagaagagaaacagcttgagttcttccactttcaacaccattaagaaaatttaaaggaaaggtgcagtttgggagaaaatattctctaaacgttcatttgataaagaacttctgttaagaatatatgaagaaccctaaaactcaatttaaaaaaagacaaacttggaattttgtttgtttgtttgtttttttgagacagggtctcactctgtcacccagactggaatgcaaaggcgcgatctcagctcactgaaacctctgcctcccaagttcatgtgaatctcctgtctcagcctcccaagtatctgggactacaggcatgtgccactgtgcctggttaatttttgtgattttagtagagacagggtttcaccatgttgcctaggctggtctcaaactcctgtgctcaagcgatccgcccacctcagcttcccaaagtgctgggattacaggcatgaaccaccgtgcccagccaaactctgatttttttaatgggcaatggatttgaatagataatttactaagtaatgtaataaatggcaagtaagcacattaaaaaacctacaatcagatgatcttcaatgggtgaacacattattggcacatcatggcacatccataccatgaaattctcctcacaataacaagaaatgaattattgacaaatgcagtaacttggatgaatctccaggtaattctgctaagtgagaaaagccaatccctaaaggtcatagactatataattccttttgttccacattcatgaaatgacaaaattatagaaatgaagaatggattggtggtttccaggggtcagggactggtgggcaggagtcagggaagcatggctatgaaaggccagcaggagggagccttatggtgatgaacgtgttcaggatcttggctgtactaatgtcagcttcctggctgtgtatcatactacggctttgtaatatggtaccataggtagtaagctgggtaaaggatgcacagagtctttctgtacttattttttaaaactccatgtgaatctacaattatcttaaaatggaaagtttaatttaaaaaataaccttgcaaataaaaggggaaaaccaaagcgtgtgtaacaccttccctgtatgcatgctttctcagtggaaccacagaactgataagggaaattttctttttatggacatattccagctgacaaatttgatgggactggaatatccccatgtgtcaccttctgtgaggtgacagatctttacatgatcattgacagctgctgacatcacataataaggccttatgaacctcaggcagcaccacctctaaagcagtcttgccacaaaacatcaaacctggacctgatcaagcatctggattgattatggatatagatggacatagagaaaatatggatatggatatagagaaaatgcaggagacagacgagcaagggaaatgtctctgtgggacaaaatccacaaaatccagattgttggaaactctccaggacaaaagatctagattcttcaaaaacaacaacattgagaaaagaactgccagaaagaaaaaatacagaaggagaagataaattaaaagaaacatgagttatgccagccaagtacaatgaatggatctgttttggatccaggtacaaacaaactgtgtaaaaattttagaagcatccatatgacagctgagaaaatttgaacactgacttagtgtttgatgttattaagaaatttttaatattttagaggtgaaaaattgtattgtgggtataattttttaaaaatttgatatttgaaatttttttgtagatatatattgaaatatttatagatcaaattgtaaaaatctgaggtggccattcattcgtaattgttgaagctgggtgattagtacatggggggttactatattaggctttctacttttgtatacatttgaaatctattgtaaaactattttagaaaatataaacaaagtaatctaatattccccatgttggcctctgcaaaaataatatctcatgtaacttgggaagcttggatatttttatgcatggcataaaaatgacaatgtacatccctctcccctcaggacacagaacacatttgtgagtcttttcaccctcatctcgttggagattttattgggcaaagaaccttcagtaggcacgaaattcattctcacaagcagatggatacgttatgctccatttattgctcatcctaaattacaaacatttccagtgaatggaaaggaagatatgattgaaaaggactctataaagacaggatgtttctgtacagtcctcgtatctgctcacctattccaaactttccagacattttaccagaggtttaagacattctcctgagggtttgttgtagagggatttttcttaaataaggagtgcaagtagcaagcaatagcccacccaattggagataaaaaaaaaaagagtgtcagttttccccagtgttaaaaaaacaaaaaaggcatcaccctgcacatccctggcaattatacaaggggatgtacacagcccccacctttcctgagttcaaaaggaaggtgggttctgaaagaagaaaaggaagagtagatctctttggatctcttgacactcacagcaaagggattaaggtatctgagtcaactcttgaggcttctttgaattcagggatgaggagagaatatggtaagcttgacatcaggtcccagaagttttgagagaaaagaacagattgctctttgcaaaacaaaccaagtggggtgcatggagccccagtgaatgggaaacagagaagtcatcataccatgaaatggtctgaaatgtcaggtgcaccatcccttgtgagtaccaaatctgtgctccgcataaacttcttcacccagagtcaactggcaggggcaactggctcaccaggagacctagctatcctcttctccaggccctaattacacctccctgcaacagggactctgccatctaacagacaaggaggtgatttggttcccacatgtggctttttctgctgggtcccttgaggtccatggtaaccttttccccattctccataggccacactttatcataagattggaggcagagaacttcagcaaccacccccttgccctctggccctggggtcagggttactcaaacaatacctgctgcccaaacctggagaagtgtagattttgccactgatggaaggataatagctattgttgatacttaatcttgggggcctagaattcccactgttttcacaactcggagcttatttctaccagccctgtcagtgaggataaatgggcatgaataatgagcagaccagtttcccaaaagctcagacagtctgcagggaacatgtaatgagcagacagtgcagttcatgccggggagcccaggtttatccaggcctcatcctcactacctttctctactgataattggacccaacaggaccattctgagtcatttttccctcttcatttattcttcagttccactcaaaaggtcagcttagggcataaggtcaattaccttctgcaaggcaatcaggacaacagttacagaaaatgatagcagccttactcttcctgtaggaattaccagcttgtcagcctccaagctcatggagacaaagcatcgaaaagttagatccaggtgctcacctatgtgttcacttattctgtgtgtgtgtgtgtgtgtgtgtgtgacatttgttgtaaacgagagggcaggagtcagtgacacagtggtgcagagaataatcatattccctgccttcatggggcacagggcttggtggaggacaaagatgtgaattcagtaagtgccccaataaatattctcctacagttgaagaaaggtgatatgatgtaatgtgcaacagagacttttacatggtggggccctggcaggtctctctgaagctgaaactggcaggatgagcaggagttcacaagacagagaggggtgaatgtgttttccaaccacgtcttagcacaaactgttctctttgctgagagctgaaaaaagacagtgtgaccagagaccatcaggtaaggagctgaacatgagatatgacctgaacaggtggaagaaggtggtgagagacaaagaaaggagtacggtgcagtagagagggcacagaagctgatgtcagggtgtctcagtttggaaccactggcagccctgctcctctcccatgtggtcccaccatggtctctagggtctgggataagaggttaatgtgtacctcataccctaagtaggggtggtccctgcactttggcaaaaagttaaggaactaaagagatggaaatgaaaaaaaagataggatgaagacttaaaagaccaaagcccttggatgttttcttttttaatttttattttttaattttttatcaagacaagatctcactatgttgcccaggctggactcaaccttccagcctaaagcactccacccaccttggcctcccaatgtgctgggattacaacatgagtcaccatgcccagcctcctgggatgtttctcaacaaaacactgaacgccaagactggtttttgtgccacgtgccaacttcacggaagccagtctatgagctaccagctgcactcagcaattccagctccccaagctttggctcaattcccgtagatgcaccactgcttgtggcctgactctttgccacccaagtgcactcagcctcccctggggagtctgccaggcttgcatggctcctactacacttgctgtgctgggacctaaaacagtttttgtgcccctagcttgactccactgtatttatggaggctttgacctcctcagtggctgccctgggacagggaggctggttagcacaattaacacaacctggtcatgcaaggcattggtagtccataaggtgaactttgaccagtgagagacaggaaatggaaagaagccaacagaaaaatcacctggccttcctcccctatgacagagtgttctgagccacagtgttttacatgtcctccctggagatgtcccacatgacttgagcaaccaactggagctctggagaaactgcagccatgctgataacatatgaccttgtatttgctttctctccttcctgctttatttccctatgtcccttactttggttgttgggattgcacctcccaataaagcattagcatgtccgctctgcttggggctctgtttcctgggttaagactctgactcttgaatgctgaggcattgtattgagaaggagtccatgctggactcacacctggtgaacaagagtgctgtggtgcatgagtgagttcttccaaaggtataagaaaagatactcagtacctgtcaccccgaactattcttctgcagcaaatatgtgtttaaagtcagcagcccttaaacatacttgagatcacagatgaagcaacatcagactagctcccaacatagaaaagcacaataggaaagaaatatttggtgctgaaaagattatagctatgagaaaattaggcaatccctctgtgagaaccagcatgcactatggtaaaggttgaaaacagaagcgtggatacaattgcttaatagatataataatatgcataactgtgtgacaggcagtgtactaacaccctcatctttcatcccatttgctcatcaaaatagtaataaaaaggcatgcactttttttttttttgacaaagtcttgctctgtcacccaggctggagtgcagtggtgcaaattcagctcactgcaacctctacctactgggttcaagtgattctcatacctcagcctcccaagtagctggaattacagctatgccaccacacctgcctaattttttgtattttttttttttttttagtagaggtggggtttcgccatgttggccaggctggtctctaactcctgtcttcaagtgattcgttcacctcggcatctcaaagtgctgggattacacacatgagccactgcacccgaccaggcatgcactcttacaaacccttattttacaggcaagaaaacagggccagagaagttgggtaactagtccaaggccacaataagagtagcagagtcaggcttggagcccaggaagtatttcttcaagtttcatgcttctaacctgagtgctgtactgcctggtggagctctctgctaatcctaactttcaggcagaggtaagcattgctgatattatatgcctgttcctgagggctaataccaggagggagatcagacttttctgtctgatctgttgcttgtcccttccatgagtcttgggatcagaatcctgaattagagagagatggactctggccaaggtaggtatgatggtttgtatgtgtcccccagaaagcacgtgttggaaactgaatccccaacacaacagtgtcaggaggtggcgcctaatgagaggtgtctaggtcatggaggcaccacactcatgaatggattaatgtccactataaagaacttgaggctgtgagttccatctgttgctgtttatgtcttttgccctcttgccttctgccactggatgatttagtgagaaagctgccaccagatgcagccccttgatcttggactgcccagcctctagaaccacaagccaattaaattttttcttcataaattacctggtctcttgtattctgttatagcagcacaaacagtctaagacagtaagacagtagggaaacgagctccagatgtacttgaagcctctcgttcttattttaggaattaaagagcaatctccaccagtttccattagaaatgcttcttcttccatatcaaatattgtgggatagcctgaaacacctctcaatacttcatgacccttctccaaaattcaacagatatgatttctatggactttactcacaggggctccagtagaagaggaagaggcttgggtttaattgaaggtggcctcaggcatcagtgaggagcagctcctttggagacatatctcctacaaagaaagcatcagaattattatcctaatatgtggacatttgcggttccttcagcaccatcgaaatgaaaagaccatggggagatgcagggagagggctctgcacagcatagccaacttgtcaggttgaagacagacaacctccacggagcacggacttcaattagttaattccccacccccattgtcacttactaacatgggatgctgattaaaaattagattctcagattatctgtgagaagcttcacttataatttaagaacttttgctgtacaaccattgcaaaataattacataaagattaattagcaaattcccaaagcagtagtaaacagcaaagtagtttaattaagaccattatctccaaaatctgaacgttaataacagttgtagcccagagagaaatatgaggcacactggcacagagtggggtaaagggaggatgtcctttgacaccaacagtcggcccaagtctccacagctgctgtcctgctaattaaactccagaactctctggccactgcatcttgagaggacctgggctcctcctatgagcctctgcagctatagccttgacaaacatgtcattgtcggcctgcctccaagaacaggcctttacccctcaggagagagggaggaagcagggggagtgaacaagactttctagtggggaattcataaaatttagaatcgtcagaaaacatctgtaaccatgactcctgtctttcagaagacactgataaatttaacccaaccccttaacacaaactctgaagtaaaagtttggcaaaggaagccagtgggaatgaaatgtaacaatagcaactatgcagtcagcacacacaccgtacgatctcacacagtcaccagatcctctcgaagccacactgccttcattctgttattatttattcatttatgagacagggtgtcactctgttgccccagttagagtcagtgacacaaggtagtgtgcagtgctcagtgcagcctccaactcctggctccagtgatcctcctaccccagagtcccaagggactgggactacaagcacgagccactaagatcagctaatggtttttaatttgtgtgtgtgtgtgtggagacagggtctgactacattgcccaggctggtctcaaagtcctagcctcaaatgatcctcctgccgcagcctctcaaagtgctgggattacaggcatgagccactgtgtgctgccatattacctttattcttaagccaaagtcactcgcttagcctcgcacatggagagccttctcttttcaactctaaagcccatttgtttacctcgataccacagagatgccctttggtggtgcaacatttagcccattgaaggtggagactcaccattgtgtgagtctggtgtgaggtatagcctagacttgacaaagattgatttctccaaagaacccctttggcagggagatcccaaatcagagagcccttaccctcacccgggacagccaatgtctgtgcagctccacacggagcaacagctactgtggagaggttgacctggaccaatctaggacaggctgaggactgcccctccccaggcccttccatgtgtcagttcctgtcacaggggagggtgtggaagccacctctcatcagagatccacatcagctcatgcacctggctctggtgctgtcccacctcaggatcattccactttctgctgcagggccttgtctgatttcacaaagacctctaggtccacactaagagacagcccagaggtatggggtaggtgtttacaatggaggtgttgacagtcatcctcatcgtggaagccaccttctgactcactgcacccatcccagccatacctcctcatccagcggctatatgtcgatttgtctctcccctaatacaaggccctgccctccaccagcagagccagactgtctgcctgcaagcctggctttttattctgctgcactcagaaattacgcaaatcacaactattagtataacagcttctgcagaattcacaaagaaaagggaaaaaaaacactgtcacaaaatccctgtgcttggttaaaagaccgttaatttccccattatcctcactcactctcttgttaatatgagatgtgtgcatctgaagcctgcttttcagtcatatgaacatctataaaagagacatcagtcagcagaaacctctggaactgcaacatgaaagagaatgagggaaaagcccaactccagctagggtggagaagagaagaaaggcgagatgtgggaggtggccctggaaggcctgggcgggggtctctagaggaacctgggaagactctggtgtgggacaaagctccagatggactctgagcactctcgctgtcctggaggacagctgtctcactgttctggagggcctcattccccttctcattcatctcactcaccatgctagaagcctcccaagggcaagagctgcacacctgcacacctgcgccccatcccctccacagccctgagcaatgagcaggcacagagccagggcccggggaggccatggagaaattgagctcctttgcttgccatcatttcagagagaccacagtagtcttattccctgtgaatggattgagtttcttctatcaatcagggtccccaaaggaacaggtggcacatggacatcagaggattcaataacctgacaatttgcaaagatttcggcggaacagtgacagcagagatgaaggagcacatgatcccaggtgctcagaaggaggaagctgcctcgagagcagggactcagtcagcccgagcaacccagcagggaggacgcaggaggaatcaaggccctgtctccctcctcactccgtctgccttcctcccaagggccccctgggagctgagggagtagaggcaagttagccacctgggccatgcctccaggtcccctcctgaggcacagagcaaggcagaaaagcttctgggccaggctctggcagcaccagttggatttcctctgtaagatgaagacaatggtcctgggagagcacagctgaccacctagcaccctgggccatgtcaccttccagctcacctctcatctgaggtccacaccagcttatgcacctggctctggtgctgtcccacctcgtgatcattccactttctgctgtgaggctctgtctgatttcacaagagaactctaggtccacaataagacagcccagaggtatggggtaggtgtttacaatggaggtgttgacaatcattctcatcgtgcaagcctgggcattcagaggcattcatattaggcctagcccaggtgttcacagccattctcatcagggccagcccaggtgtcgctgctatcctcactaggcccacctcagatgttcacaactgacctcattgggcccatgcaggtgttcatagccatcctcatcaggacgagcccagggttcatagctgccctcaccgaggtttgtttatattttcatataacattgtgaaaaactggcttggggccactgagtatagctgtgatcacctgagtttggcccaatgaggacagctgtgaacacctgtgctaggcccaatgaggacagctatgaacatctgggctgggccccaagactacagctgtgcttattggaccctgatctggtgctcttagccatcttcattgagaccagcctaggtgttcacagcttttctcattgggtccagcccagttgttcatagctattctcatcagggtcagcccaggtattcacagctggccatggagctcagccaagttgttcacagctgtcctcatgagacccagcctggtgtttaccaccccctccctgagttcagcccagttttttacatccatcttcactggggccagcccaggtattcacagctgtcctcattgtgccaagccaaggtattcacagctgtcctcatgggggccaggtgaggtactcacagctgttcctttcaaggccaacccaggtgtttactgctgtcctcattgtgtccagcccaggtgttcataactgtcctcatggggttcaggtgaggtgttcacagtgatgctctttggagccagccaaggtgttcacagccatccacattggcttcatccaagatgttcatagccatccttattggagccagtgagtttgttcacacccatgctaatacgtgtcaaccaaggtattatagctacactcatctgggtgagccaaggtgttcactgctatcctcactggggcccagcccaggtgttaatagttgtccttatgggcccagcccaggagtttatattggttctcatcagggcaagtccgggtgttcagtgccatcctattgggccctgacctggtattcagagccatcctcactactccagcccaggtattcacagtcgttctcatcagggccttgtacgtgtgctcatagttgtcatcattaggtgtttatgggtaagtccaggtgttcagagccatcctattaggcccagtttaggtgttcagaatcatccttgtggtgcctagcctagaagttcccagctgtaattatcatagtcagccagggtttccacagtcatcctcatcaggaacagccgtggtgttcacatccatgctcactgggcctagttaaggtattagaaccatcttaatcatcagggccagatcaggtggtaatggcagttctctttagtgccagcccagttattcatagccattctcattggaaccagataatctgttcacaaacattctcattggggccagccaaattatgatagccatcctcatcagggccagctcatctgttcacagctgtcttcaccgggggcagcataggtgttcacagccatcctcaatgggtccagccaaggttttcacagctgtcctgattgggcccaccccagaggttcacagctgtcatcataggacccagcaaagaagtacacagctgttctcattgagctcagcccaggtgggccagtgccaattagtgtgactataataccttgcctggacccaactagcatgggcaggagcaaattggctgaccccagtgaggatggctatgaacatctgggttggtggcagtgtggaaaaatatgaatatcttggctggccccaaagagaaccaccgtaaacatctagacaggccaaaatgaggaagttttgaagacagccatgaactcctgggctggctacgatgaggacagttgtgaacaactgagctgggccaaattaggacagctgtaaacactcatgctaggctcaatgaggacagcagtgaacacctatggtggccaatgaggtcagatgtgaacaactgggttggcccaataaggacaacagtgaacacttggcttatccgcatgaggacagcttggaacatccgagctgatcttgataaggactactgtgaatacatagactgaacccaataacaacagctattaacaccttgactagttccctatgagaaccactgtggacacctgggcttgcccccaatgaagatagctatgaacacttgggctgacctcaatgatgacaactgtgaacacctttgctggcactgatgaggaccattgtgaacatgttggcttgcagtaatgaggacagatatgaacgcctaggctggacccagtggaaagagaagtgaacacctaagctgacccaacaatgaaaattgtgaaaaactggcttggagccactgaggatagctgtggtcacctgagtttggcccaatgaggacagctgtgaacacctgggctaggcccaatgaggacagctatgaacatctgggctggtccccaagactacagctttgaacaaatgggccgaccttgatgaagatggctgtgtacacctggggtaggcccagtgaggacagcaattaacacttgggctttgcctgtatgaagtaaactgtgaacacttgtgctgactccaatgagcctggctgggaagacctgaactggccccaatgaggatggctataataccttggctgggcccagtgaacatagatgtgaacacttaggcaggccctgatgaggagcactgtgaacacctaggctggtcctaattaggaaaactgggaacacttgggcagggcccagtgagaatgggctatactcagtgatgaaaactgtgaagaactggcctggatcctgtgaggacgaatatgaacacttgagcgtggaccagtgagaaaggctttgaacacctgggatggccacaatgatgatggctgtgaacaccttggctggcctcagcgagtgttgctataatagcttggctggccccaattaacatgggtgtgaacaaataggctggacctaatgaggatggctgttaacacctcaggtgtctcagttgaggatcactgtgaacacctgagcaggctcagatgaaaatagctatgaacacctaggctggtcctgatgaagacagctaggaacacctgggtgaggcccagtgaggatagctattaacacctggctggctttcatgaggatggctgtgagcacctggtctggccactattaaacagtctctggacacctaagctgggcccaatgaggacagctattaacacctgggctggcccaataatgaccgttgtgaacactaacccagataaggatggctatgaaaatttgggctggcatctaggtagatggctgtgacctcccaggctggccccagtgaggatggttctaattctttagctggcctaaaagagcatggatgtgaacacctgggctggtcctaatgaagacaactatgaatacctaggataacccccaataaaaacagctgggaacacctgggatggccttcattaggaagtctccaacacctggactgggcctaataggatggctctgaacacctggacttgccctggtgaggacctctgtaatcacagtgctgggcccaatgaggacaactattaacacctggtctgaaaactggtgaggagtgctctgaacacttaggctgaacctgaggaggatggctgtaaacacctgacctgacctcaatgaggacagctgtgtaaaactgggattgacctagtgaggacagctgtgaacacgtagactgatcctactggggacaatggtgaacatctaggctaagcccaatgaagatagctctgaatacctggacatggctcctatgagataaagtgcaaatgcctgggcttgcccaatgtggacagctatgaatacctaggctgagctcaattatgaaagctgtgaacacatgggcttggtccagtgaggacagtggtgaacactcaggctggccctcatgaggacagctgtgaacactttgtctgggccccatgagaacagcagtgaatacctgggctggccaaaataaggtaaaacaactgagctaaacccaatgagaatggctgtgaacacctaggctagacaccaagaaaatagctttgaacacatgagctgagctccattaggacacctgtgaatacttggcctggcaccagtgaaaacagctatgaacaattgggctaggctcagtgaggatggctataaacacctatgctgaactccatgagatcagctgtgaacacctggctataataccttggctggccccaattagcatgagggtgaacacattggctggccccaagaagaatgactatgaacacctgaactggcaccatgtgaatggctgtgaccacctgggctggcaccaatgaaaacagctgtgaacaactaagctaggcccaatatgaatggctctgaacacccaggcttgcacaataaggatgactatcaacacctccattagccccaatgaggatggctgttaacacctgggctggctctgataaggacaactgtgaacacccagcatgagcccaataagaacagtggtgaacacttaggctaggccaaataaggtcagccgttaaaacctgggctggccacagcaaggatggctgtgaaaacctgagctggacccaaaggaaacacctatgaaaaactgggttgtggggtagctggcaagatggccgaagaggaacaattccagtctgcagctcccagtgagatcgacacagatgacagatgattccttcatttccaactgaggtacccagttcatctcattggtactcgttggacagtgggtacagcccatggaaggcaagccaaagcagggtggggtgttgcttcatctgggaagtgcaaggggtcaggggatttccctttcctagccatgggaagccttgagagactgactgtaccaggaggaatggtgcattccggcctggatactgcacttttcccgcagtcctcaaaaccagcagaccaggagattctctcctggctgttttcattaggggttatgctaggtattcatagttgtcttcattgggaccagcccaggtgttcacatccatgctcttttaggccagctaaagaattagaaccatcctcactggggccagcctgggaggtcacagccatctacctagatgccagcccaaattttcatagccatccttatctgggttagtgttcacaacggtcattattgggccagcccaggtgttaatagctgtcctcattgggcccagcttaggtgtccagagactgtttaatagtggccagaccaggtgctcacagccatcctcatgaaagccagccaggtgttaatagctatcctcactgggcctcacccaggtgttcctagctgtcttcatcaggaccagcctaggtgttcatagctattttcatctgagcctgctcaggtgttcacagtgatcctcaactgagacacctgaggtgttaacagccatcctcattgggtccagcctggttcagtgggttctaccccaacagagctcaacaagctaagatccactggcttgaaattctcactgctccacagcagtttgaggtcaacctgggatgcttgagcttagtggggggaggggcatccatcattgctgaggcttgagtaggcggttttaccctcacagtgtaaacaaagctgccgggaagttcaaactgggcggagcccactgcagctccctgggacaaaacacctgtgggaagactgtgggtacagcttcaaccgacttaaacgtccctgcctgacagctctgaagaaagcagcagttctcccagtacagcgttcaagctctgataagggacagactgcctcctcaagtgggtccctgacctccaatgtgtccagactgggagatacctcccagtaggggctgacagacacctcatacaggagcgctctaactgatatctagggggtgcccctctgggatgaagcttccagaggtaggaacagggagcaatctttgttctgcagcctccactggtgatacccaggaaaacagagtctggagtggacctctggcaaactccaacagacctgcagcagaggggcctgactgttagaaggaaaactaacaaacagaaaggaataatatcaacatcaacaacatcaaagacgaaaggtagataaatccacgaagatgacgagaaaccaacacaaaaaggctgaaaattccaaaaaccagaacgcctcttctcctccaaagtatcataactcctcgccagcaagggaacaaaactggacaaataataagtttgacgaattgacagaagtaggcttcagaaggtggttaatgataaactcctttgagctaaagaagcatgttctaacccaatgcagagaagctaagaacctggataaaagtttggatgagttgctaactagaataaccagcttacagaagaacataaatgacctgatggagctgaaaaacacagcacaaaaacttcttgaagcatacacaagtatcagtagctgaactgatcaagtggaagaaagtatatcagagattgaagatcaactcaatgaaataaagttagaagacaagattagagaaaaaagagtgaaaagaaatgaacaaagactccaagaaatatggacaatgtgcaaagaccaaatctacatttgattggtgcacctgaaagtgacgaggagaatggaaccaagttggaaaacactcttcaggatattatccaggagaacttcctcaacctagcaaggcagaccaacattcaaattcaggaaatacggagaacaccacaaagatattcctcgaaaagagcagccccaagacacataattgtcaggttcaccaaggttgaaatgaagaaaaaaatgttaaaggcaacctgagagaaaggttgagttacccacaaagggatgccaatcagactaacagctgatctgttggcagaaaccctacaagccagaagacagtgaggggaaaattttcaacattcttaaagaaaagaattttcaactgagaatttcatatccagccaaactaagctccgtaagtgaaggagaaataaaatcctttcagacaagcaaatgctgagagattttgtcaccaccaggcctgccttacaagagctcctgaaggaagcactaaacatggaaaagaacaaccggtaccagccactgcaaaaacataccaaattgtaaaaagcatcaacactatgaagaaacttcatcaactagtgggcaaaataaccagctagcatcataatgacaggaccaaattcacacataacaatattaaccttaaatgtaaatgggctaaatgcccaaagacacggactgggaaattgaataaagaggcaagaccaattggtgtgcccatctcacatgcaaagacacaaataggctcaaaataaaggaatggaggaagatttaccaagaaaatggaaggaaaaaaaaattaagggttgcaatcctagtctctgataaaacagactgtaaaccaacaaagatcaaaaaatacaaagaagggcattacataatggtaaagagatcaatgcagcaagaagagctaactatcctaaatatatatgcacccaatacaggagcacccagattcataaagcaagttcttaaagacctacaaaaagctggagaggatgtggagaaataggaatacttttacactgttggtgggactgtaaactagttcaaccattgtggaagtcagtgtggcgattcctcagggatctagaactagaaataccatttgacccagccatcccattactgggtatatacccaaaggactataaatcatgctgctgtaaagacacatgcacatgtatgtttattgcggcattattcacaatagcaaagacttggaaccaacccaaatgtccaacaatgatagactggattaagaaaatgtggcacgtatacaccatggaatactatgcagccataaaaaatgatgagttcatgtcctttgtagggacatggatgaaattggaaaccatcattctcagtaaactatcgcaagaacaaaaaaccaaacaccgcatattctcactcataggtgggaattgaacaatgagatcacatggacacaggaaggggaatatcacactctggggactgttgtggggtggggagaggggggagggatagcattgggagatatacctaatgctagatgacgagttagggggtgcagcacaccagcatggcacatgtatacatatgtaactaacctgcacaatgtgcacatgtaccctaaaacttaaagtataataataaaaaataaataaataaataaataaataaataaataagacctacaaagagacttagacgtctgcaaaataatagtgggagacttttacaccccactgtcaatattggacatattaacgagacagaaaattagcaaggatattcaggacttgaactcagctctggaccaagtggacctaatagacatctgcagaactctccactcgaaatcaacagaatatacatttttttcagcaccaaatcacacttattctaaaattgaccaagtaattggaagtaaaacactcctcagcaaatgcaaaagaatggaaatcataacagtctctcagaccacagtgcaatcaaattaaaactcaggattaagaaattcactcaaaaccacacaactacatggaaactgaacaacctgctcctgaatgactactgggtaaataatgaaatgaaggcagaaataaagatgttctttgaaaccaatgagaataagacacaacataccagaatctctgggacacatttaaagcagtgtgtgagggaaatttatagcactaaatgcccacaagaaaaagcaggaaagatctgaaattgtcaccctaacgtcaaaattaaaagaagtagacaagcaagagcaaacaatttcaaaagctagtagaggacaagaaataactaagatcagagcagaactgaaggagatagatacacgaaaaacccttcaaaaaatcaacgaatccaggagctggttttttgaaaagatcaacaaaatacagagactgctaagcagactaataaagaagaaaagagagaagaatcaaatagatgcaataaaaaatgataaatgagatatcaccaccaatttgacaaaaatacaaactaccatcagagaatactataaacacctctatgcgaaaaactagaaaatctagaagaaatggataaattcctggacacatacaccctcccaagactaaaccaggaagaagtagaatccctgaatagatcaataacaagttctgaaattgaggcagtaattaacagcctaccaaccaaaaaaaagcccaggaccagatggattcacagccgaattctaccaagggtacaaagaggagctagtaccattgcttctgaaactattccacacaatagaaaaagaaggaatcctccctaaactcattttatgaggccagcatcatcctgataccaaaacctggcagagatacaacaaaaataaaggaaaatttcaggcccatatccttgatgaacatcaatgcgaaaatcctcaatcaaatattggcaaacccaattcagcagcacatcaaaaaggttatccaccatgatcaagtgggcttcatccctgggatacaaagctggttcaacatatgcaaatcaataaacgtaatccatcacataaacagaactaattacaaaaaccacataattatctcaatagatgcagaaaaggcctttgacaaaattcaacagcccttcatgctaaaaactctcaataaactaggtattgatggaaagtatctcaaaataataagagctatttatgacaaacctacagctaatatcatactgaataggcaaaaactggaagcattccctttgaaaactgacacaagacaaggacgccctctctcacttctccttttcaacatagtattggaatttctggccagggcagtcagacaagagaaagaaataaagggtattcaaacaggaagagaggaagcatattatctctgtttgcagatgacatgattgtatatttagaaaaccccattgtctcagcccaaatctccttaagctgataagcaacttcagcaaagtctcaggatacaaaatcaatgtgcaaaaatcacaaacactcctatacacaaataacagacaaacagagagccaaatcatgagtgaattccagttcacaattgctacaaagagaataaaaaacctaggaatacaacttgcaagggatgtgaaggacctcttcaaggagaactacaaaccactgctcaaggaaataaaagaggacacaaacaaatggaaaatcattccatgctcatggataagaagaaacaatatcgtgaaaatgtccatcctgcccaaaataatttatagatttaatgctatctccatcaaactaccattgactttcttcacagaattggaaaaaaactactttaaacttcatatggaaccaaaacagagcccacatagctaagacaattctaagcaaaaacaacaaaactggaggcatcatcctacctgactttatactacaaggctacagtaaccaaaagagcatggtactggtaccaaaacagatatatagaccaatggaacaaaacagaggcctcaaaaataacaccacacatctacaaccatctgatctttgaaaaatctgacaaaaacaagcaatggggaaagaattccctatttaatagatggtgttgggaacactggaatgcagaaagctgaaactggatcccttccttacaccttatacaaaaatttattcaagatggattaaagacttaaacataaaacctaaaaccataaaaaccctcgaagaaaacctggccagtacctttcaggacacaggcattggcaaagccttcatgactaaaacaccaagggcaatggcaactaaagccaaaattgacgaatagaatctaattaaactaaagagcttctgcacagcaaatgaaactatcatcagagtgaacaggaaacttacagaatgggagaaaatttttgaaatctatccatctgacaaaggactcatatccagaatttacaaataacttaaatttacaagaaaaaaaacaaacatcctcatcaaaaagtgggcaaaggatatgaacaggcatttctcaaaagaagacatttatgcagccaacaaacatgaaaaaatgctcatcatcaatggtcattagagaaatgcaaatcaaaaccacaatgggatatcatcttgtgccagttagaatggcgatcgttaaaaagtcaggaaacaacagatgctggagaggatgtggagaaataggaatgcttttacactgttagtgggagtgtaaattagttcaaccattgtggaagacaatctttgttgttctgcagcctccactggtggccattcctcaaggatctagaactagaaataccatttgacccagccatcccattactgggtatatacccaaaggattataactcattctactgtaaagacacatgcacatgtatgtttattgcagcactgttcacaatagcaaagacttgaaaccaacccaaatgcccatcaatgatagactggataaagaaaatgtggcacatatacactgtggaatactatacagccataaaaagggtgagttcatgtcctttgcagggacatggataaagctggaaaccatcattctcagcaaactaacacaagaacaaaaaaccaaatactgcaagtgggaattgaacaacaagaacacatggacacagggaggggaacattatgcactgaggcctgtgggggggtggggggtgaggggagggatagcattaggtgaaatacctaatgtagatgacaggttgatgggtacagcacattctgcacatgtaccctagaacttaaaacaaacaaacaaatgaataaacaaacaaaaaaaaactgggttggacacaaggaggatggctgagaacacctgagctggccctgatgagaatggatgtgatcacctgggctgccctgatgagggtggccctacgatattggctgcacccattgagcatgaatgtgaacacctaggttgtccctgacaaggaccacagtgaacacctaagctgcccccgataaggaaagcctggtctggcccccatgaggaaggctttgatcacctaggaaaggcacaataggatggttgtgaacacctgaagttgccctgagatggacctctatacaactatgtttatagtcatgaaaacatgtgaactataaacatgtgaactgggtcagagaagtatcacggtgaacacttaggctggacccagtgaggagagctatgaacccctggcctggcacaatgagaatgtctatgaaaacctgggctttgcccagagaggacggctgtgaaaacctggattgacccctaagaagaggcttggaacatgttggctggcctgcttgaaggcggctatgataccttggccagccctaatttccatagctgtgaacaggaggactggccctgatgaggatggctatgaacatttgggatggtgataatgtggattgttgtgatgggctgagctggctcaagtgaggaccactgtgaacacctgcaaaggcccagataagaacagctatgaaaacctgggatgctcccagtggagacagctatgaacacctgggctgggctgagtgtggacaacagtgaagacctgggttagctcagatgaggacagctatgaataccctgccaggccccgatgagggtgaccttaataccttgattgacaccagtgatccacattaggacagctgtgaacacttgtgctggacccaataactacatcagtgaacatttcttggggctggaccagatgaggacaattgtggacacctgggctgggctcaaaagaataactgtatattagggctgggtataacaaagacagctttgaacatgtgggctgtaccctatgaggagagctttgaacacctggactgacacctattagaatagctgtgaatacctccactgggactaggtctctatatgaactactttgtacacctgtcctggcccaatgaaaatagcactaaacatttacattggccctcatgaagagatctttgaacacctgggctttctctgatgatgatggctgtgaacacctgggccatcctcactgggcacagccaagtttttcatagctgtcctaactgaacccagcctaggtgttcacagctgtcatcattgggtgtaacctgggtgttcacatctacccttatttgggcctagcccaggtattcaaggtttcctcattgggcccagcacaaacatacacaactatggttgtgggcccagccctggtattcatagccattgacatcggggccagcccaggtgtacatgaccattctttccagggccagctaaggtgttcatggctgtcctcatggggccagcccaggtgttcacagctgttctcataggtcctatcccaagtattcactgctgttctaatgcggcctagttcaggtgttcactgctgccctcattgtacccagcccacatgatcacagatgtcctaatagggcccagcccaggtattcactctaaaacctggccagggcccaatgaggacagctgtgttcatctaggctgggccccatgaaggcagcctggaacccctggcttgacccagggaggattgctgtgaacacctgggctgccccaatgagggtggctatactataggttggctggccccaaagatcatggctgtgaacacattggctgatcctgatggggatggctatgaacacctgggctcagcccaatgaagatgacgacaaacaccttggctggccccaatgagaatgacaatgaacaatttcctgggccaaaggaggacagctgtgaacacatgaggttggcccaatgtggacaggagtgaatacctggttgtcctagatggggacagctgtgaacacctaggcttgcccacattaggacagctatgaacacctgggatgggcccagtgacactagcagtgaattcctcagctggatttgacaaggatggttatcaacacctggactggccccaacctagatggctatgaacacctgggcatggcccaaaagcttaactgagtacatctggcctgggcacaatgaggaaaactttgaaacatctgggctggtccctgtgaggacagatttgaacatttggacttaccctgatgaggacagctgtgaatactttgactggccctgaagagaacagccatgaacacctggcctgggcccaaggagaacagctatgagaaaacctgtgactggccaagaaaggaccactgtgaacaccttgcctggtttcactgagggtggtatcctatttgggctggccccaattagcatgagtgtgaacaaattggctggctccactaagaattgctatgaacatctgagctggtgctaatgtggacagctgtaaccacctggattggccccactgaggaccaaatgtacatttatccttttgggcccagcccaagtgttcatagccacctaagctgaggctaccccaggtgttcataaccatcctcatcaggtccagccccttgaggtgttcactgctatagtcattgggtccagcccaggtgttcatagccgtcctaatgtggacaggcccaggtgttcacagctgttctcatctgggacagccaggtattcactcctattcacattgggtcaacctcacgtgtttacagctgtcctctttggacccaggaaattgttcattgccattctcattggagcttcccagatattcaaagccattctcatcaaggcatatctggtttttaaagctgtctgcattggccctgacaaagtattcacagcttttaaaatattggccagtgcaggtgttcacagctgtcctcattagagccagcacaggttcttacagccatcctcatccgagccagcccaggaattttcagtccttcacatggggacccagtccagtgtttaatagttgtcctcactgggctgagcccagatgttcacagccatccaaatactcattagggcaagtccagatgttcagggccatcctattcggccctgccctggtgttcagagacatcctcactggcccagcccaagtcttcacagtcgttatcgtaggggacttgtacatgtgttcatagctatcatcattaggtgtttatagtggttttcatctgggtgagtccaggtgttcagcactatcctattgggcccagttcaggtgttcagaaccatcctcaagatggctaccttaggtgttcccagctatacttaccatggccagcctgggtttccacagtcatccttatcaggaacacccctggtgttcacatccatgctcactgggcctagccaaggcattagtgccatcttcatcattgaggcctgaccaggtattagggcagtttattttagtgccagcccaggtattcatagcgattcttatcgggaccagccaatgtgtttacagacctcctcattgggaccagccaaattattatagccaccctgatcaaggccagccaatttgttcacagccattcttctcagggtcagccaacttgtttacagctgtccaatgggcaacctaggtgttcacagctgtcctcattgtgcccagccaagatttttatagttgccctgattggacccaccccagagggtcacagctatcatcataagacccagctcagatgtacacagctgttctcattgggctcagcccaggtgggccagtgccaatgagtgtgactataataccttacctggacccaattagcacgggcaggaacaaattggctgatcccagtgaggatggctatgaacatctgggttggtggcagtgtggaaaaatatgactatcttggctggccccaaagagaaccactgtaaacatctgggcaggtctagaagaggaaagctctgaagacagccatgaactcctgggctggctatgatgaggacagttgtgaacaactgagctggaccaaattaggacagctgtagacactcatgctaggctcagtgaggacagcagtgaacacctatggtggccagtgaggtcagatgtgaacacctgggctggcccaataaagaaaataataaacacataggcttgttcccatgagggcagctttgaacacctgagctgatcttgttgaggacaactgtgaacacataggctaagccgtataacgacagctattaacaccttgactaggcccctgtgagaaccactgtgccactgtgaacaccagggctagcgccaatgaggatggctatgaacacttgggctgaccttgatgatgacaactgtgaatggtaccaactttgctggcactgatgtggaccactgaaaacatgtcagcttgtagtgatgacagatgtgaatgcctaggctgggcccattaaagagatcagtgaacacctaagctgacccagtgatgaaagctttgaacacttggcctgaggccaatcaggatagctgtgatcacctgagtgatcgcaatgagtacaaagctgcccaatgagcacagctttgaacaactgggttgaccttgataaggatggctgtgcatacctgggctgggcccagtaaggcatcaattaacacctgggctttgcctatatgaagacaactgtgaatacttgtgctggctctcatgagcgtggctgggaacgcctgaactggctctgatgaggacggctacaataccttggctgggccctgtgagcatagatgtgaacacttgagcaggccctgatgaggaccactgtgaacatctaggctggccctgattaggaaaggtggaaacacctgggctgggcccagtgaggatgactgtgaacatttaggctgtacccaatgaggatagctgtgaagaactggcctgggtcccatgaggacaggtaagaatgcctgggcttggccctgtgaggacagctttgaacacctgagacagcccagatgatgatggcagtgaacaccttggctggtcccagtgagtgttgctataatagcttggctatacccgattagcgtaagtgggaacatataggctggacccaatgaggatggctatgaacaacttagctaggcccaatgaggatggctgtcaactcctcagctggctctgatgaggaccactgtgaacatttgggcaggcccagatgaaaatagctatgaacacctacgctagtcctgatgaagacagctaggaacacctgggtgaggcccagtgaggacagatatgaaacctgggcttgctctcatgaggatggctgtgagcacctggtctggccactattaaacagtctctgaacacctaagctgggcccagtaaggacagctattaacatctgtgctgcccaatgatgacagccgtgaacactaagccagataaggatggctatgaacatttggggtggcatcaaggtagatggctgtgacccgccaggctggccctgataaggatggctctaattccttggctggcccaaatgagcatagatgtgaacacctgggctggtcccaatgaagacaactgtgaatacctaggataggcccgataaaaacagctgggaacacctgggatggccttcattaggatgtctccaacacctggactgggcccaataggatggctctgaacacctggacttgccctgatgggaacctctgtaaccacagtgctgggcccaatgaggacagctattaacatctggtctgaaaactagtgaagagtgctctgaacacttaggctggacctgatgaggatggctgtgaacacctgacctgacctcaatgagggcagccatgtaaaactcggactggcctagtgagtacggctgtgaatgcctgggctgatcctgatgaggacgacagtgaacatgtaggctaagccccatgaatacagctctgaaaacctggacattgctcctatgaaaatgattgtgaactcccgggcaggcctcagtgccctgtggacctgactctggggagaccaaagtagccctctgagacctgcaccctgccccagagagtccccgcatcctcacctctgtgccttcccagtgacccccgcacctctgcctgtgttgcagattcctctaacatgaaagagtcatgatgtggggatgtcaccctggcccagaaaggatacaaatcatgatgctctggaagattttatttagcaatgtcttgtatatagctgatgttatatttgttgttcttttatttgttgtttttatagtggctttatttgttacgtcattatatttgtcttgctatattatttgttgtcttctatatttgtttaaagttacatattaagtaatagttatccccttctaattgcttatagaatattttcctgtgaaatgaaacccatgataggaaatctccctcagcagagctaggactcactgaattagaaagcagtccctccagtgactgccactctctctcttatgtcttcctaatttcatcttaattggccgaagtaccagcaaatacaccctcactcattgtctttacatcagtgtccttcgagagattgttgtctgaaatctgttccttcctctggaagggatcctgggaacaaccttccccacggtctccacagtgacttagctgtcagggcctttcctgccccatggtcagcacagctggtgtgagcttcctggctcactggcgctttccctgagtgtcttcagaatttttctccatttttttccagcatagagtatttcttgctgagaggtggatgagagtctaattttcacttctttgtgtattactcactcttctagtctagatgctttaaaaatgcgttttgtcttcaagttcaggagtttactcaaatatcatttgctgttagccatttcacatcaatcctcagtattcttttgaagaaacacttacaaaacattgtttttattttcagaaaaaattggaatgatcgttgttcatatttccttgtgtctttgctttgattgttctcgttcaggcaccttaatcatgcatccatttggctactctccctaaacatttataacctcttgctcattttcttttgaaatattctcctcactttaaccttctgtttcttagaaggcagaagctgtcattgtgttgtctctagtttacattttatagctgaagagtgtttccaattatttttcttagtctttttggagtttcatccatgcattgctctatttctttaattctgatgaatggtgtccttttgtgtttgatattattttcttaatgcctttgatctcattgttgaaaaggccacagtccagtgggtgagttacattgaggtgggaactttcacattttctagtggttttactctataagtattcattttgtctattacatgtctttgtatgagaattggcatcaatatatttctgttgctgatttttatatggattttgtcttcatgaatttgtaatgagcattataattcagaaaccttttccaacctcatagagcttctctctctgaaatctctgtgcagtgctcacaactatgacaccggtttcctggaatttcctgcctctgtgcttctccccttctgtaacaggagcctcctccctggtttcctccactgcactccaatcctctctttggaacctgcaactgaatattgctcctaaatgggaagactgtcttgcaaggggacaactgccacaatattgccaaaatgtaagctgattcactttaagtgcatattcactttccagatcattttgttcttttctgttatatatctgaaaaccggtttcttctctgacttattttatttatttttatttgtcagtattttattcttatgattatcaatttttacttttttgtgtatttaagattttttgtattttgatgtttatatttgagtgattttagacttaattttcacatgattttagatgtatctcttttcaaagtgatttgttgtttgctgtggggatttatctttaggtattgggtggttgttatttattttgaatccagtagattcccagacatgcagggtcatgtctaactgggccacaaactctttctgcctcttgacattttcaggcatagacaacaggctcttcacagtgcactgtggatgtcacaaaatccccataaattgtccttaaattattgcccatgttttattaaaaagtattatttaggaagtaacctctgaaaagaaagaactcttttaattttctttactaatatttaaaaatttagtccacatataaaagcatgtctgtcatattatgccccaaatcctcttattgagcaattggaaaacatattcctaagctgaggcttacagtcattgctcgttatctgcaggggttggtttcaggacccccacagattccagcatctgacaatgctcaagtccctggtataaagtggcacagcatctgcatataagccatgcccgtgctcctgtgcacttgaaatcatctcagatctctcctcaaccccataggcaggaactgctatgcaaatagttgttatcctctctgccagcccctacctccacctaccttgtcttatgcctctcttccatgtgacttttcctgagctgcattttttaatatgaaataaacctgtacatatgagtagagtgcttttctgagttgtctgattcattctggtgaacctgagggaggtgttgtgggaactcctgaattggtagtctgccaggaagaagcctcggcagctaggccaccccattggttgctggcatctaagtgaggacagtgctgtgggaccgagcacataatcataggcctgctggccatttgtatgtcattttttgagaaatgtctcttcaggtcatttgaccatttttaaagagattattttgttttgctgttgactcgagttccttatatagtctggatattaatttctcattcgatggatagtttgcaaatattttctcccattctataggtcatctcgtcactcccttgattctttgctgtgcagaagtttgttagcttgttttggtcctatttatgtatttttgctcttctcacctatggttttttttaaaaatctcagcccagaccaatgtctagaggaatttctcaatgttttcttttagtagtgttatattttcaggttttccattaaagtctctaatccatctggatttgcattttgcatataataagagataggggcccagttttttctctacctttgaatgttcagttttccccttatttattgaagagactcttctttctttaatgtatgttcctggtgcaggtaggaacggagtgctagtaggagctgggtgcatggctcgagtaggagcaggagcagagtgctggtaggagctgggtgcacagcacaggtaggagttgggcacgggtaggagtggggtgctggtagaaggtgggtgcacggcatgggtatgtacggagtgctagtaggagccggatgcatggcatgggtagcagcggagtgtcaccgcatgcctccctggaggacctgtcgggactgtggccccaatggcagcctggccctgcctcaatggcctgggctctgaactgcaggatctcacaggtggaagaaaccttggagacccgcagcccccagggccatggtggctcccaacaggggagggccacccaaagccccctcccatggtgcccttgccaaggagtccctggatgggcctgtttagactcctttgatgatggggcccccatgaccccaggacagccctgaccatctcttactcactgttgaccttccttcagaccaggagatgcacaatatttgccaataggaatctcccatcttcccttaattcaactgtttcactgacatcccacaagcaccaccccccatcaggtgcccttaacctgtgtcctcgaccccattgaccttcagaaggcctcacccatccagtggctccatggcagaacaggtctcccagagcccaggccatggagcagagcctcccgtggcaccaacagtggcagcagtacctgtgcatgctcccatgtcctgagcatggactctggacagagcaaggtcaggctgcaaggctgtctttagtcagggcctgaccctaggacagtgtggaaacactggaatggtttcagaaagggatggacagcattggatttgaggtccttaaaagtgactttgggtactgtgtcgagagtggatggactggcaggagtgagaggctcagggcaagtgaggaggcagctgaagaactcaagaggcagtcaaagggggactcgagggtgggaggaacaggcacatctgttcacagctgtgcctcagaagccctgtgtttcacacacttgccgatttcagaaagggccatccatcattctcatgaagtgtctactcattctgaaagaactcatctagatcttgagtggctgcctgttctttccccttagagttacaattatcattttcatttacttccaactaataaatgcaagtggctgattctgatgagacctgtttcatttcctgcttgaaagtctagagcaagaatacttagctcagagactgaaagtctagagcaagaatacttagctcagagactgatctggatgaggctggggaaggagaccaccagagcttaaacgaagccactaaaagcagtaagagaaacaactgtgaagcctgtgagaaaagcagggtgtgtttctgataaggaaaggtattaagtgtgaaggaaatgtttttattaaagaaaaagtactttgtccttaactaaaatgattcgttactccagaatgaaaaaaaaaaaagagtagggcaaaatataaatggacatagaaagttgtagaaggtttgtggaaggcaaatgcatatgtggtgaagccagtaagattagatacatttatttataaaattcattaaatgtggccaatagtgtaccgatgcaaaactagaatttctatttctgtctgttaaaacaatggtttcttagattgttggtcggctttttaaaaagattgtaaaaagtttttctttaccttttaaattatttgcccaggaaacaaagattttgtatctaatcatcataatttcttgggcttaatgttaacctttatcaggtccttgcttatgtaagagaattagtgctccttacttttaaaagtgcctctcaaaagcagatcctagatgaaactttcttctccaatggtcttgagatttcccagagggatttagaaaaacctgagagaatttgttctttcatctcatgaggagatatgttcaaaataatgtggtttatttgataagttcagttgcctggaaagatgatgtcaaataagaaacaaaaaccttcccttggttttatttgcatgggtagaaagtattaacataaatatttcagaaattgtatgaaattcctagaaatgtgtcagtgtctctactgctcataatgtgtccgggtatgttatcagtcataattccagctgttacttttaaatgttgcatgccatggaaatcacctaaatcccttgtgaattgcattatttttataatgaggtctcaataggcctttaatatggtcattttaagtcttgtcattcacagattttgttattctcttattcttctttaaaatattttcagttaccagccaaagtggctcctcttcaaaaaaaaaaaaaaaagtgatggtctgagacccataggggcttcgagtaaacgtttccgatgacatttacttacataattttgagatcataccacttgactgagttaagatttgcagaatgaatggaggagctgacggatgcataaaactgctaattcaagatcaagcagaacagaatttaatcacataggactgaatgaactgataaagaatgataatggattttgtttgaaacattaccggctcacccaggcgcagtggctcacgcctgtaatcccagcactttgggaggcgaggcaggccagtcatgaggtcaggagttcgagaccagcctgaccaacatggtgaaaccccgtctctactaaaaatacaaaaattattcaggtgtggtggcgtgcacctgtaatcccaaccactccagagactgaggcaggagaattgcttgaacccaggaggcggaggttgcagtgaactgagatcgtgccattgcactccagcctgggcaacggagcgagacaccatctcaaaacaaacaaacaaaaaactcataaaaaaagaaacattgctgactctttaatgtagtattttctgggtgtatggaactcctttctcttttctgttcagctgtctacaactcatagactaaattttgtgaacagaaataaacattttatcttctccctgcctgattccttcagaatttagaaactcttaagggcaataaaattatttgcataagttcaaaaagaatctgttctctttgcaacaggacacaattagaaatattggttatattaccaaggccttgactggaatgtcatatttgggaataatgcataaaatcagacatgaccagacaattttaaggaaataagataaactttatggagccaatgcctacaaagacttcttgaggaaaccagcctggcacctggcttatagggtttccaggcatacaggtgactaaggaaaaaccacttcacggcatccccaggaaacaggataatttggggacccggaaaaagaagaattcattcacatctatcggtattggaggtgatggcttagcttatcttcctaggcttgggtttctaggctcaagagtcttttaaaggctaattggagattctgtattacaagttacagaaaagcttgtctatgtggtcatctcttcttgctgcagtcatataaataatcagttcaaatctaataagattacttatgttgtaaacaagaataaatttactttggttattttttatcaattaactgggaggcaatgactatagaaacttcacatttccatggagactttccaaactaatgtttgcaacttttctccttccctcctgacttggcttatctgagaactagaactgcccttttccccaagccctgcaacctgaaactgcatgacctgatataagtttcaagaaaatcacacaacaactcaagtgtggacaaccttcatgcctgctgctgtgtaggccactcagaaagctccccagcacactgcacagtatctccaaagatactcaagctgcaaatggaaagaaccattggatgaccttgcttttcctcactccagcatgtaaaggtgtttcaagcccagcatttacaaatctgggctaactgccctctggactctgaagtagtagttactctcattttcctttttactcatagagattttcatcattaaatgcctaaatgcttgtatcatccagcaaatatccccctccaaatgagaaataatcttgtattgttcaaaggaaagaacaatgtctctttgttctttgaataagggggccaagggtaacaaagactatctcgttgaccaagctagagtcagcctcctctaagtcctctttttgactaggccacagctttgagctctgctcttggcccatttagtccagttttagaaagaaccctgctgaatccatttagcaaacatcctccactcttggtatctgatcactgtccatatctgaccaaatgccaaattgctgaccctcaacatgttgtcatcatggcctgccttcagcaagaatcctggtgagttttagccttgatgtgttctcttaggaatttaccatccactgatcccagctctgcttcttggctataaatctccacttgtcctcactgtattcagggttgagcttgatctctctcccctactgcaaaaccacattgcagttgtctcttctggagtaggcttccttgtcatctttaagtgtatgagtttttttcttaaaaaaaaacaatagttagggaggacaggtagcattaggagatatacctaatgctaaatgacgagttaatgggtgcaacacaccagcatggcacatgtatacatatgtaactaacctgcacattgtgcacatgtaccctaaaacttgaagtataataataataaaaaaaggttataaaaacaaaataaaatttgcatttagtgtacacagtctgattgccctgaaaactgtctttcctagtttgttctccaaccaacatgtgcaatgtgcctgggaccatgccctcttatcaagggaaaggcaggagagagctggcatgagggccattcaggatatgaaagtggctgggtgtggtgactcacgcctgtaatcccagcactttgggaggccgaggctggtagatcatgaggtcaggagttcaagaccagcctggccaagatggtgaaacctggtctctacaaaaaatacaaaaaaaaaattagtcttgcgtggtggcgggcatcccagctactcgggaggctgaggcagagaattgcttgaacccgggaggtggatgttacagtgagctgagatggcaccactgcactctagcctgggccacagagcaagactccgtctcaaaaaaaaaaaaaagaaagaaagaaagaaagaaagtgatgtgagaacaagatgttcctgatgtggacatcatgaacgactccagactggagtatcaaggctgacaaggctggaaagattcccttgctgagttttgcaagatatgcacagtaaccatatactaattttgagttgcaaaattgaagaattgtttatatatgtcctcatcttacaagaacacctgaagtagctcagttgtaagagatttagattgcaaatcaaaaggtacttggatggggcccaggttccagtaggatgatcaccttttttatatccaggtctcatttcagtcataagaagtattcacagcagagcttcccctgcaggatgctcaagtatatttgctgtggcaactgagggaaccaagcctcagtcatgttccccagagcttgcccatggcatttacatttgcaaaaagtaaatctcttgatttccttttggtttcagtagtgtgatttccttttcaaaaataatagcaagtgatactagtttacatataaatagaaactgtaaagttcctttgtttttactatttatcaatatatttaataattatatatatttatatagcctgaaataatgcaaacaactttaaagaattgacacatttgtttatattttacaggtaaaaagattaaaattttggcttatttgcctgaagtcacactgctagttaaatgacagagctaaaaaatgttaaataagttgctaaatgaatgtaattaatttggtttgtttgtttcctaaaatattgatttaaatgtctttatttaaattttaaaatgatagcatttgaaagagtataaataaaattcttaagccgcaatagtaaaggaatttagttacaatgcatgaagttagaagcaatagctttggatttgtaaatgtattcttgaagggtgtcataaagaaatattttattcctatttttcctttgttttgttggagtagttttcccccatctttaatgaggtataattgctttaccagttcgaataggtttttatagccattgtggagtctttagatttttctatgtatatgatcatgtcaactgcaaatagggagagtttttcttcttccttttagatttagatacatgctatttctttttcttctcttattgctctggatagaagttccaatactatcctgaatagaatcaatgagagtggatatccttgccttgtatgggattttagaggaaaggccttcagctttacaccattgattatgttagctgtgagtttatcacctacggcctttgttgtgtgggggatatgttcctcctatacctattttattgagagttttttttaatcaataatagaagttgaactttgtcaaatggtttttctccatctgttgagatgatcacatgtactttttccttgtttgtgtattcaccacattaattgattcacatcagctgaactactcccatatcccagagatatatttcactttgtcatgctgtatgatccttgtaatgtgcttttgaattcagtctggtcatgtctcattgaggatatgtgcatctatgttcatcagggatactggcttgtggctttattttcttgctctttttctggctttggtatcagtgtgatgccagctgcatcaaatgcatttggaagtgtcccctctacttacatgtgctggaagcatttgataaggattgttattattcttctttgaatgtttggtagaatccactcacgaagccacctggttctgggcttttcttttttgggaggtttttgtttgtttttttaaaatattattcatttttccatctttattgaggtatcattaacaaataaaaatgtatatgtttacagtatacaaagttatattttgatactcatattcatcatgaaatgatttcccccaatcaaactgagtaacatgttcttcacctcacatacttatcattctttttgggatatggtaaaaacgtttatgatttactctctcagcaaattttacacattcaatacagtaatattaactagtcaccatgctgcacctttgatctccagaacctattcatcttgcataactgaaacttggaacccttttaccaatatctccctattttcctcacctctcagtcctcggaaaccatcattctactcttggtttctgtaagttcaacttctttagattccacatatcctgcgattatgcagaatttatcttctgtgtctggcttgttttgtttagcatgccctccaggttcattcatgttgtggcaaatgatagagctttcttctttttaagcctgagtaatatcctattgagtatatacagtgcattttctttatctattcatccattgatggatggacacttagtgagggtggcatgtggataggaggcgttctgcatttctccagttagatctcagtctttattgagcctgtgtctctgaacttcacatgggtttctcaggcttctcccacgaggtcgcaaaggatagctaaggtggactggagctggacatttccctcccccaacacagagggctggagctagctgagatccagtctcactttccctacctaggtcagtgaggttctgataaaatcttagaaaacttaggttctggttaagtagttttgcctgaggacagactttgttaagcacagagcattctggtagcatgagtatttccccccagtatttactgtgagaacctggttgagctactggaggtcaaaaccacaaaacgatctcgcttccccatgactgagtgcccctggtgtttttagttctcaggccagtccacagccagcctctagcagcttcattgcagctgaagctctcctgccctagcctggctcccacagagctttctgcacttgtgtgtcttgactccctgcattcattttcctgtctctgtaattttgaaagcagcagttgccccatgaatttaattattttgtgaatctatgatgaatagttgattgttcagctttgttctttttgttaacatggtgtatcagtccattttcatactgctatgaataaatagtagtgtgggtaatttatgggtaatttattactgggtaatttatgaagaaaaagaggtttaatggactcacagttcatatgactggggaggcctcccagtcacagtggaaagccaaggaggagcaaagtcatgtcttaggtggtggcaggcaagagcctgtgcaggggaactctccctatttgccgatgacatgatcatataggtagaaaagtgatagtgagacttattcactatcacaagaacagcacaggaaaaacttgcccccatgattcaattacctcccaccaggtccctcccaagacatgtgagggttatgggagctacaattcaagatgatatttgggtggggacacagacaaaccagatcacatggaatggtgacttccaaactccttataggcagaaccccagactgcaggggtgatggcaggaggcagtgcatggttaggaagctgcacagtcatcctgttcagaggagatcaggctctggccaggtagaataggtggagggacagaagcagtcaggtgtggacatgctgtgaagctacagagaggggctctgccgatggagtggagatgaggtagagagaagacagaagtcaagaaaaacaaaacagtgggaacctgaacacctgtggggatggagctgctctcatggaagaggaggatgagggaggttgggctcaggggaggggtctagagcttgggcttggtgtgttagatgtcaacatagagatgttgtggcagtggctgtgtagctatgaatctagactaaatgaaagagtgtggaatggataaatacagaggtcatatcagtatgggtggcatgtaaagccaaggggctaggtgagaccagcaaggggatgagtttctgaagaacaaaagtgacgcaagaactcattcatgagtcaaagctaatggtaacaggtttgagagaaaaatagaatccaacaacagagaaacagaaaggatggccagtgagattggaaagaaaatagcccactgaactggaagctaagtagtggaggcatttcagggagagagggatggactgtgtcaaatgcggccagtagagaaaagtcagagggacctatttgggtgatgggagtgttctaaaatggaattgtggtgcttgtttaattctgcagattttgttttaaattaattgagttgggtgaattttaggacatgcaaataatagctcaataaagttgtttcataaaatattagcatatatcaacccagatgttctactcccagagaaaataaaagctcatattgatcaaaaggacatatgcatatatctataatatattcataataccccacatttgaaaataaacaaaatgtccatgaaatattttgtgtaatatttgtctcagtaatataaaatgtcatattaccgaaacaaacagagtgaactgcttatctacacaagaacagataagtttcaaaaacactttgagcaaagcaggcagagatcagaaagcacattgtaattgattccatgaccttgatgctgaggctcaactgggatgtgttcagagcaaccttctccaaggctgcgtgagtcagggcgagtggacactgattggaaaggaactgggggggatttctgtgttgatacacaggactcataccttgatagggttgcaggacgcagtgggggtataacattttaaaggcttattcaagctatacacttaagattggcacctttcactatattttaattgtctgttgatacacatacaataagaaacaggtaaagaagactgattactagacagtaaggagacaagcatgtttatttactaatcctccttgatggtgaccatgaaactgactagtataggctgcctgttcctggttgattccaggtggaatgctgaggtgttccccagggtttgttgtggtgcagaatccatggttgcagggatggaggggccgggatcttctgtgaaacttcgtttggggctgatatttacgaaatgtgtgaggtgatatataagatgctgcccaatggcttcagtccacaactcactttccaaagccatcaggggagacactggtctcatcagcttcttggtaggtcttttatttttgttcagacttgttgaatctgttagaagctgactttatgtaagacatgaaaagtgactcacaaaacacaggctgcagaatgtgagaaaaaaatcaattcatttagaagcttggtgttttgaaaaaggagtatgcagagatggaggcagcactagagaatgcctggctaaagaaggagtctttaaatattcccagccttgcagatgcttacaaaaaggtgaagagtgccaacttggtatcgatgaaggaattaacttctttggttcgagaagtgaaaaagaaaagttccaaatgctctaaccaacgaaggcaatggaggagctacctaaaatgctggaatccctagacaaggtcgtgggaatcagcccacagcaaggagctcttccaaggtggccaagagtgtggccctgctgctcccttccctgggagtgggcctgggtcttaagggagcgctgttccctcctctctactcaggcctcccaagcctccaggctgccttccccacctcgagtccatctggggcgggtggatccaggagcccctcctgggctggagttcctccaccttcacatgctgacatcacagccagctccttcatgttcaactcctccacatccaaggaacacggggcttcctggcgtgcaccaagaatgtgagactttcttagtcttcacagaaagtttagattctctctcaccagcagtgaaaaaatactgtatttaagatactatcttttactcagattgaaactttgtcaaactacatttttcaagacaatgttttgttaatattatttatattaatcttataagtgaataatttatattttatgatataaatattttattaaaattttaaaacagatggaatttaacaacaaagactgttagtagtcaatagtgtaaaaggaaaataaaatgttgggaccccaaactcgctatgccaaaagggaaagttaaacttggaaactgagtcacacccagaaaccatctttccttttgttcctaaacatatctttccaggttacctccctcaccctgaccatgtaaattagcaacttatcttcagggatacaggacaaaaggaaactagaaatattcctaccaccaccccaagacaaatgcatgttgatgcttcctctactctatgtttgctttatctcatgtgaggtgcagccttaccagtgccaggcgagcacataatcagctgttcctctaccccctccttttcatgggcaacctgtggcttcagtgagaactaatgaaagcctcaagacaatgagaccacttgtctcattttttctactctcccctttttgtcttctttcctttccctttggcctgctttttcccctataaatattgaaaccctcaaaactctttggaaaaagtgcaggccacagattccactgtggcttgtgtctctttttcccgggtgcatcctcaaccttggtgaaaaaaacctctaaatagattgacacctgtcccagacactctttttggtttccaatagcagtattttttccctagagttgtattcctaatgcccttaaatcatgagtaacagcaacagttttgcctaggtatgaatagtattcattgaacaaaagagaagataatagatctattttgggatggagttaaatggtacactgcaagataaatccatattatttattttttatatactcatctaataatggcaaaatatttatttaaaaaaaacaaaattgataaatgatctggagattgtattatttccctgccagaaaactgcagcgagagtttcctcactaggaagcaatgccccttgggcaatgtggggagatgtccacatcgctgccttgtccctttctcactcacctatgaaccctcctcaggggacagatgaggggagtctcagtctctcccacataataaacctgggatccccacaattagtatctgtagttacaaatgatgcccccactttagacaatgagcatgaagtgggtgttgttttagtggaagaagagcagcaagtgatcctttgattaactggtgtagtcacataagataaatgacaaagcatccaaagaaagctaatggcttcctctcaagaatgagtaaaacaaacaaacaaacaaacaaaaactatgcttgagttggagacaaagcaatgaagactagaaagccagagcatcatggggccaaaaccatggcgaggttgtgcagaggcatcttgtcaccatctccttttctgccgcccttctcaggcggtccagagggaagaggaaggtcaccaggttggcctccaggagaaacagcggcaggttgagtatgcagctgtcctttgcaaggtggtctgtctgaaagagcaatgccctcggttaaggtgaggtagaacttgtcagtgaagaggggcttgggctgctcacggaagtatctatattagacaaatctaaagagacataaagttagagattattacaggctgagaaaaggagggaatacaaagttattgatttatgggtacagagtttcttgttaggatgatgaaaatgtttgcaaatggtggtgatggttgtacaacactgtaaacataattaatggctaatgttatgtataaatttgaaatacacattggcaattttaggaagctatacaaagagatactctcaatgacactgtggataaatcaaggttttattataaaaagtgctgaagtaacaaacaggaaggcaggaaaaataaaaagagaaataaacaacaacaacaacaaagaatagagagcaatcacaaagcaaaaagtaaaatgccagacttaagccctgacaaattaagaaagaaatgggcagagttgattttaaaaaccttaacccgagtagcctcactaagtgaaactcacttcaaatataataatataggtagcttgaaaggtaaaggatacaaaaaagtatatcatgcaaatattaatcaaaagaatacaagagtggctatattaatatcagatcatgtagacatcagatcaataaaaatcattatagacagagagaaactatatataatattgtttacataacaatactatgtatatgtatgtacatatatacatatgtattatatatacatggaacacctcatctaacaacagcaaactactcattattttcaagtgcccacagaacatataccaagatatatcatatatggatcataaaacaaacttttcaaaagtttaaaagagttgaaattatactgagagtatcctccaaccacaatggaattcaacaagaagataacataaaggtaagaggaaaatctgcaaacactcagtgtggctgtttcctcatgtgaaaatgtaacatacaaatgtgactagcttaaagactttggaatgagaatattattctggcttatccagatgggccataactataatcacaggtgttcttataagatggaaagagagagaattttaaccacagaaatggagaaagccacatgatgataggcacagagactggaagggtgcagccacaagccaaggaatgtgagccatcacctgaagctggcagaaacaaggaacgtattctctctggagctgacagaaggaagcagccctgatgataccttgattttagccacataacactcagcttaaattcctggcctccagaactgagaaaaaataaatttctgttgttataagcagttaaatttgtgacaatttgttacagcagcaaaataaagctattatactgtgaatctaaacacattctaaataatccctgggtcaaagagaaagtctcaaaggaaatttgatattatattgaactgaataaaaatataatatgtcaaaaattgtgggacagagctaaagaagtgccaaagggaaaatttacagcataaaatgtacgtattagaaattctcaattcaattatctaagctcctacctcaagagtctagaaaaagaaacttaaaataaacccaattcaactaaaagaaaggaaataataatcccagcactttgggaggctgaggccggttgatcacgagctcaggagatcaagaccatcctggccaacatggtgaaaccctgtctctactaaaaatacaaaaattagccgtgcatggtggcgtgtgcctatagtcccagctactcaggaggctgaggcaggagaatcgtttgaacctgggaggcagacgttgcagtaagccgagatcgtgccactgcactccagcctaggagacagagtgagactctgtgaaaaaaaagtgaaagaagaaagaaagaaagaaggaaggaaggaaggaaaaggaaggaaggaaggaaggagggaagaaaagaaagaagaaagaaagaaagaaagaaagaaagaaagaaagaaagaaagaaagaaagaaagaaagaaagaaagacacagaaagaaggaaggaaggaaaggaaggaaggaaggaaaggaaggaagggagagagagaaagaaaggaaggaaggaagggagagagagaaagaaggaaggagagaaagaacgaaagaaagaaagaaagaaagaaagaaagaaagaaagaaagaaagaaaagcagtgagattgaaaacaaaaataatacagaaaattaatataaccaaaaactggttctttgaaaagatgaataaaatggacacatcttagcaagtctgctaatgagaaaaaagagaaaatacatcaattttcattatcaggaataaaatgggatatcactataaaccatgcagagatcaaaaggataataaataaatactgcaatcaactctgcacatacaaatttgacagcttaaatattcacaaataaaaattcacaaattcattgaaaaacataaactaacataactcaatgtaaaataaattgtttgaatatactcacaattattaagtaaattgaattcctatattaaaattatcaaaaaagcaatctccaggtccagattgtttcactgtagaatttggccaaacatttaaagaatagcaccaattctacacaatatctttcagaaaacagaagagaaggaaatactacaatttatttcatgaaaatatattaccctgatatcaaaaccagacaaagtacaaacaagaaaactacagacacataaatgtagaaacagaaacctttaagaaaatattagcaaatagtattcattgatgtataaaaacagttacacactatgaccaagtgaagtttatttcaggaatgcaaggctgcttctatgtttgaaaatcaatgtaatctacgacattaacaggctgaagaaaaaaatcaaacgattatatcagtcaattcaaaaaaatcgtttgacaaaattcagcacccattcatgaatttatgaagaaaactatctgaaaaataggaataggagaatttttaacttgataaaatcatctgtagaaaaaaaaagaaagctaaattacacctgagaatgaaaaactgaatgctttctgcaaaaattgggtgtatggcaaagatgcccacttttgtcactcttattccaatattgctagaaattctagccagtataggaaggcaaggaaaatactataaattagaaggaaagaaacagaccctagttgcagatgacatgatcgtgtgaaaattcctgaaactttcaaataataagcaaaaaaaacccctcctgaaataaatgagttcatgtgtgtgtgtgtaatgtgtgtgtgtaatgtgtgtgtgtgtgtgtgtaatacatatagttggcacttggtatctgtgggttccacatctgcagattcaatcaaccagagataataaatatttgaaataaaaactaataaaaagaacaataaaatataaaatattataaattaaaaacaatataacaactatttatataaaatttacattgtgttaagtattataaataatctagaaatgatttacagaatacaggagaatgtgtgtaggttatatgcaaatactatgccctttttagttttaatttttttaatttttaatttttatgggtacacagtaggtgtagatatttattagatacatgagatgttttgatatactcatgccatgtgaaataatcacatcatagagaatggggtatccagcccctcgaacatttatcctttgtgttacaatccaattacactcttttagttattttaaaatgtagaatcaagttatcattgactatactcaccctgttgtgctatcacatagcaggttttattcattctttctaagtattttttgtacccattaaccatacccactttcttcctgatccgccactacccttcccattctctggtaaccatccttctactttctatgtccacgagttcaattgttttaatttttagatcccacaaataagttagaacattcaaagtctgtctttctgtacctggctgatttcacttaacgtaatgatctccatttccatccatgttgttgcaaatgactggatctcattcttttttatggctgagtatactccattgtatataagtaccatattttctttatccattcatctcttggtggacacttaggttgcttccaaatcttggctattgtgaacagtgctgcaacatacatgggagtgcagacatctctttaatatactgatttcctttcttttgggtatatatctagcagtaggattgctgaatcatgtgatagttcaatttttagttttgtgagggacttccaaactgttctcatagtggttgtactgatttagatccccttcaacagtgtaagagggttcccttttttccacattctcaccagcatttactattgcttatcttttgaatataagccattttaactgggtgagacaatatctaataccatgaccttttatataaaggacttaagcatctgcagaatgtggtatttgtgggggtcctggaaccaatctcttgtggaaactgagggatgactgtattggaaataacatgcaagcattaaaaaatttttaaaagtacaatcacttagaaaataatacaatagagtaaatctaacaaaacatgtacaggacttaaatgttgaaaaccacataacactgataaaataattcaaagttctaagtaaataaaaaaccatactatgtttatgtattggaagattcaatatagtaaagatgtcatttttccctaaattgattcataggttagaggtgattccttttaaatcccagcaaggttttttttttttgtagatataaataagattatcctaaatgtatacaaaaagacaaaggaactagaatacccaaaaccatcttgaaaaaaaatgagagaaatttgtctactctatttcaagacttacctagtcaaaaaggacaaggtagagagatagacctgtagatcaatggaccagacagagagctcggaaatagaatcacataaatattctcaactgatttttacaatggatgaagattgactttcaacaaatggtgctgctattcacaatagcaaagacttggaaccaagccaaaaatccaacaatgatagactggattaagaaaatgtggcacatataccccatggaatactatgcagccataaaaaatgatgagttcatgtcctttgtagggacatggatgaagctggaaaccatcattctcagcaaactattgcaaggacaaaaaaccaaacacagcatgttctcactcataggtgggaattgaacaatgagaacacagggacacaggaagggaaacatcacacactggggcctgttatggggttggggaagtggggaaggatagcattaggagatatacctaatgttaaatgacgagttaattggtgcaggacaccaacatggcacatgtacacatatgtaaccaacctgcacgttgtgcatgtgtaccctaaaacttaaagtatatattaaaaaaaccaaatggtgctgaaataattacacattcataggcgaaaatcctttagttttagtctcatactttatatatgaattaactccaaatggatcatgtatttaaatgtagaatacaaaactatagaaaaaaaaaccttcaagatctaggactaggcaaaatattcttttgatagataccaaaagcatgatttgcaaaaagacccatttataaactggacttcaccaaagcgaaaaccttttgctctgtgaaagatcctgttaagcagatagaaaaacaagttttaaactgagatcatgtattttcaaatttatgtatgacaaaagactggcatttaaactcaacaataaaaactcagtaacaaatcaaaccaccaaattagaatatgaccaaacgcatgaagaggcatttcaaccaaagaaggtatacagaaagtatagagcacatgaaaagatgtttgacattgttatccattaagaaacacaaattaaaaccacaatgtgccataattaaatgcctatcagaataaccaaatttaaaaatatcctaataaccctattgctggtgggaacgtagtatgataaagccaccccctgatgaacagtttgggagtttctgtaaaaatttgacacatgcaactaccatacaaaccagttactgcactcctcatcattcatcctacagaagaaatgacttctgttttcacacacataaatctatgctggagtgcttttagcagctttatttgtaatagccaaagccagaaaacaacccatatgtccttcaataggtgaaagggtaaacaaagtgtggtacatctatacaatgaatactactcaacaataaacatgggtcgggcacggtggcttatacctgcaatcccaacaccagaaggcagaggcaggaggatcacttgagcccatgagtctgggaccagcctaggcaacatggcaaaatcccatctctacccccaaaatactaagaaattagccacgtgtggtggggcacacctgtagtcccagctacttgagaggctgaggtgggaggatctattgagcctgggagtttctaccactgcattccagcatgggtgacagaggagaccctgtctcaaaataattaattaaaaaaatttataacttaggaaaacataatgaatgagttatttacacaccaataacccagaggaactgctggagaattatactggtaaaaaagctaaccatcaaaagctatatgctgtacaattccatatatgtaacattctttaaaaaaataacaaaatgaagaagcaattagtgatttccagaagttaatgaaggtgtggaggtgggagggaagtgtgtgtggctagaaagagcaacatgactgattgttgtgttgatttacgattctgcatcttgtaatatcaacgctaatatcctgggagtgctgtccttctatagtttcacaaggtgttaccattggcaaaaactgggtaaatggtacacagaatttctgtattatttcttgcacagtatgtacatctacaactatctcaaaaaatgttcaatttgtaaaaagtagctgcagaatgtacatgacatccctaggtgaaggtgacctatttataatagcattacatgtataaatccctaggaatggatttagtaagaatatgaaaaaagtatatagctttattactgaataaagggaattctgtcctcgttaggatactcagtagagtaaatataagaaaatttcctgaggtaaacctaaaaattccaccacaaacccagtcataatcataatatatttctttatgaaactctagacactcaatcttaggtttcttcaaaggaataaatgcccattagtagcctgaaatactctgaggaagaaatgagaagtgaaacatggctgatagtaaaatatagtgtaaatttacagtgatcaaagagaactacatcctagtaggaagagacaagtaaatcaacacaacaaagtagtctctagcaatgcacacagggagattttgttgactgtaaaggtgatcttacaggaaaaagaggaatgaacagactatttgacaacttactgtctaagtggaaagacaataaaaggataaatgtccatcttacataaagtgttctctaaattaaaaatataatacattggcataaaatacaacatactggtaaatgatacatacaaccagtttatagaaggaaagcaaatagccgataaacataaaaagatacccaacctcaccaataattaaggaaatataactcaaaacaacattcacttgtcagattgacaaatgcttaaaatatgtaaatacttaactatccaaaatattaatatccagggttggaatagaaatgattgaaatggagggggcgtggagccaagatggcagaataggaacagctccagtctacagctcccagcgtgagcaacgcagaagatgggtgatttctgcatttccaactgaggtacccggttcatctcactggggagtgccagacagtgggtgcaggacagtgggtgcagtgcaccgtgcatgagccgaagcagggcaaggcatcacgtcacccgggaagtgcaaggggtcagggaattccctttcctagtcaaagaaaggggtgacagacggcacctggaaaatcgggtcactcccaccctaatactgtgcttttccaatgggcttatcaaacggcacgtcaggagattatatcctgcacctggctccgagggtcctacgtccatggagcctcgctcattgctagcacagcaccctgagatcaaactgcaaggcagcagcgaggctgggggagggccccccgccattgctcaggcttgagtaggtaaacaaagctgctgggaagctcgaactgggtggagcccatcacagctcaaggaggcctgtctgcttctgtggctccacctctgggggcagggcacagtcaaacaaaagacaacaataacctctgcagacttaaatgtccctgtctgacagctttgaagaaaatagtggttctcccagcatgcagctggagatctgagaacaggcagactgcctcctcaagtgggtccctgacccccgagtagcctaactgggaggcactccccagtaggggtggactgacacctcacacggccgggtactcctatgagacaaaacttccagaggaacgatcaggcagcagcatttgcagttcaccaatatctgctgttctgcagcctccaactgctgatacccaggcaaacagggtctggaggggacctccagtaaactccaacagacctgcagctgagggtcctgactgttagaaggaaaactaacaaacacaaaggacatccacaccaaaaaccatctgtacgtcaccatcatcaaagaccaaaggtagataaaaccacaaagatggggaaaaaacagagcagaaaaactggaaactctaaaaatcagagtgcctctcctcctccaaaggaacacagctcctcaccagcaatgcaacaaagctggacggagaatgactttgacgagttgagagaggaaggcttcagaagatcaaactattccgagctaaaggaggaagttcgaaccaatcgcaaagaagttaaaaattttcaaaaaattagatgaatggctaaatagaataaccaatgcagagaagtccttaaagaacctgatggagctgaaaaccatggcacgagaactgtgtgacgaatgcacaagcctcagtaaccaatgcgattgactggaagaaagggtataagggatggaagacaaaatgaatgaaatgaagcatgaagagaagtttagacaaaaaagaataaaaagaaatgaacaaatcctccgagaaatatgggactatgtgaaaagaccacatctacatctaattggtgtacctgaaaatgacggggagaatggaaccaagttggaaaacactctgcaggatattatccaggagaacttccccaatctagcaaggcaggccaacattcaaattcaggaaatacagagaacaccacaaagatactcctggagaagagcaactccaagacacatatttgtcagatttaccaaagttgaaatgaaggaaaaaatgttaagggcagccagagagaaaagtcgggttacccacaaagggaagcccatcagactaacagctgatctctcggcagaaactctacaagccagaagagagtgggggccaatattcaacattcttaaagaaaagaattttcaacccagaatttcatatccagccaaactaagcttcataagtgaaggagaaataaaatactttacagacaagcaaatgcagagagattttgtcaccaccaggcctgccctaaaagagctcttgaaggaagcactaaacatggaaaggaaaaaccggtaccagccactgcaaaaacatgccaaattgtaaagaccatcaaggctaggaagaaactgcatcaactaatgagcaaaatatccaactaacattataatgacaggatcaaattcatacataacaatactaaccttaaatgtaaatgggctaaatgctccaattaaaagacacagactggcaaattggataaagagtcaagaaccctcagtgtgctgtattcaggaaaaccatctcacctgcagagacacagataggctcaaaataaagggatggaggaagttctaccaaggaaatggaaaacaaaaaaaggaaggggttgcaatcctagtctcggataaaacagactttaaaccaacaaagatcaaaagagacaaagaaggccattacataatggtaaagggatcaattcaacaagaagaactaactatcctaaatatatatgcacccaatacaggagcacccagattcataaagcaagtccttagtgacctacaaagagacttagactcccacacaataataatgggagactttaacaccccactgtcaacattagacagatcaacgagacagaaagttaacaaggatacccaggaattgaactcagctctgcaccaagcagacctaatagacatctacagaactctccaccccaaatcaacaaaatatacattcttttcagcaccacacctattccaaattgaacacatagttggaagtaaagcactcctcagcaaatgtaaaagaacagaaattataacaaattgtctctcagaccacagtgcaatcaaactagaactcaggattaagaaacttactcaaaaccactcaaccgcatggaaactgaacaacctgctcctgaatgactactgggtacataacaaaatgaaggcagaaataaagatgttctttgaaaccaatgagaacaaagacacaacataccagaatctctgggacacattcaaagcagaatgtagagggaaatttatagcactaaatgcccacaagagaaagcaggaaagatctaaaattgacaccctgacatcacaattaaaagaactagagaagcaagagcaaacacattcaaaagctaccagaaggcaagaaataactaaaatcagagcagaactgaaggaaatagagacacaaaaaacccttcaaaaaatcaatgaatccacatgctggttttttgaaaagatcaacaaaattgatagactgctagagagattaataaagaaaaaaagagagaagaatcaaatagatgcaataaaaaatgacaaaggggatatcaccaccgatcccacagaaatacaaactaccatcagagaatactataaacacctctacgcaaataaactagaaaatgtagaagaaattgataaattcctcgacacatacactctcccaagactaaaccaggaagaagtagaatctctgaatagaccaataacaggctctgaaattgaggcaataatagctttccaaccaaaaaaagtgcaggaccagatggattcacagccaaattctaccaggggtacaaggaggagctggtgccattgcttctgaaactattccaatcaatagaaagagggaatcctccctaactcattttatgatgccagcatcatcctgataccaaagcctggcagagacacaaccaaaaaagagaattttagaccaatatccttgatgaacattaatgcaaatatcctcaataaaatactggcaaaccgaatccagcagcacatcaaaaagcatatccaccatgatcaagtgggcttcatccctgggatgcaaggctggttcaacatgtgcaaatcaataaacataatccagcatataaacagaaccaaagacaaaaaccacatgattatctctatagatgcagaaaagggctttgacaaaattcaacaactcttcatgctaaaaactctcaataaattaggtattgatgggacatatctcaaaataataagagctatctatgacaaacccacagccaatatcatactgaatggacaaaaactggaagcattccctttgaaaactggcacaagacagggatgccctctctcaccactcttattcaccatagtgttggaagttctggccagggcaatcaggcagtagaaggaaataaacggcattcaattaggaaacgaggaagtcaaattgtccctgtttgcagatgacatgattgtatatctagaaaactccatcgtctcagcccaaaatctccttaagctgataagcaacttcagcaaagtctcaggatacaaaatcaatgtgcaaaaatcacgggcattcttacacaccaataatagacaaacagagagccaaatcatgagtgaactcccattcacaattgctttaaagagaataaaatacctaggaatccaacttacaagggacgtgaaggacttcttcaaggagaactacaaaccactgctcaatgaaataaaagaggatacaaacaaatggaagaacattccacgctcatgggtaggaagaatcaatattgtgaaaatggccatactgcccaaggtaatttacagattcaataccaaacccatcaagctaccaatgactttcttcacagaattggaaaaaactactttaaagttcacatggaaccaaaaaaagagcccacattgccaagtcaatcttaagccaaaagaacaaagctggaggcatcacactacctgtcttcaaactatactaccaggctccagtaaccaaaacagcacggtactggtaccaaaacagagatatagaccaatggaacagaacagagccctcagaaataatgccgcttatctacaactatctgatctttgacaaacctgatagaaacaaggaatggggaaaggattccctatttaataaatggtgctgggaaaactggctagccatatgtagaaagctgaaactggatcccttccttacaccttatacaaaaattaattcaagatggattaaagacttaaacgttagacctaaaactataaaaaccctagaagaaaacctaggcaataccattcaggacataggcatgggcaaggacttcatgtctaaaacaccaaaagcaatggcaacaaaaaccaaaattgacaaatggggtctaattaaactaaagagcttctgcacagcaaaagaaaccaccatcagagtgaacaggcaacctacacaatgggagaaaatttttgcaacctactcatctgacaaatggctaatatccagaatctacaatgagctcaaacaaatttacaagaaaaaaacaaacaaccccaccaacaaatggttgaaggatatgaacagacacttctcaaaagaagacatttatgcagctatacagacacatacacacgtatgtttattgcggcactattcacaatagcaaagacttggaacaaggccaaatgtccaacaatgatagactgggttaagaaaatgtggcacatgtacaccatggaatactatgcagccataaaaaataatgagttcatgtcctttgtagggacatggatgaagctggaaaccatcattctcagcaaactattgcaaggacaaaaaaccaaacacagcatgttctcacttataggtgggaattgaacaatgagaacacatggacacaggaaggggaacatcaaacaccggggactgttgtggggtgggggaggggggagggatagcattaggtgatatacgtaatgctaaatgacgagttaatgggtgcagcacaccaacatggcacatgtatacatatgtaacaaccctgcacattgtgcacatgtaccctaaaacttaaagtataataataataaaaaataaaaaaataaaaaataaataaataatcaaggcttttacagaaaaaaaaaagaaatgattgaaatgattattgccagaagcacttggtgggaatatgaatgggaactgcttttttttttttttttaggataatttagttgtgagataggaatagaactgggttgttgcaggaaaatggaaaaacccaaacaatagctgaaacaagaactaggcacaaaaacccacaggataacagaaaacccaaaataagggagagaaaatgtctaaagccccagtgagggtgacatgtccatgacccttccaggcaaacccaaataagggaaaataggggtcagtaactggggagtccatgaaacccctccttttccataatatttcatgattatttcactctcaaattaaagaaacaggcataagataggaatgctgggtgatcacaggagaagcaggaaaatatcaagaaacaattttacataatgtcaagaaaagagctgttaaaattagctataaggacaaagatgagcctggcctgataagatcctcacagataaaatggggccacactggctgaaacagtctaggtccaacatggcattggatttgacccatgccctactccagacctaattatatgcctattccaaaactaagtcacacacccaccacaccatggtagatctgagcatggccatatttcttataaaaatgggtggccctcaagcctaagaaatctccacctttttcctagaaaatctactcttttcctagcaaatctattctattctacttcctaattagaagacaccataacattagatacccagactctcctgtgcacaattcactctcccaagtatacctgcactccaactctcaagtgcatactttccctttgcaataaaagctttttgcttttcccttcattctgactcatccttgaattttttcttgcaacaatgtctacaacctggaacactggctgtggctgggagacctacctaggtcctcctgcaacacttgaatctattcaaaatccaaaatgtgcctaccccttaactcatcaattctccttccagggtatagctgtagaatacactcacacatgttcacagaatgacagacaggaagatgatcattgaatttaacttttgtctgcaatagcaaaaagaagtagaaggaggaggaggaggagaaataggaaacaaaacataatgtcctttaattattatacattatacattcatgccatagaataccagtcaatcattaaaacaaatggcataaatacatgttttggcatgaaaatatttgatatataattatatgcaaaaaatgttttacagaatgatacatgtagtatgaatacaattgttttaaaaacccagtcacaaactaccagaaatatatttgtacaaatttctatatatttagatgtaaatgcacagagaatggactggaattatggacttgttggcatgtgttacatacaaagagggaggtgggtgtaggagtggtaaagagacctattcacatctgtccacttatatttttattgtttgaatatagtatctcccaaaaaaccttatgtattacatgtgcaattgtagaaatcaataaattttaaaacaaatctaaaccaacaagaagtcgcagggcataaaagtctatgggttgcccaaaaagaaccacatatagccaggacccctaatcatgtctatttttaacttctgcatatgatcttcaagataacaggatgtcaaggctggaggggcctgaaagatctcaacagctcagcaaggggatctttcgggatgagtcacaagacatgggtttggggtcgaggcagagagcagaggataggatacagatgggtactccagagccgatcgacatttcaactcacctctaattttacctgtgcctcaaaatgactctgccaccttcagtattcttaaaccttcctaatgtaatattgaagaacccttccaaatgctgtttacttccaaataactcttccatacacccatggtatagcctctctacctgtatcttgaatgttcttttccctggtcacagagaactttacggcctccctagcaaccacatagtagatatacttggagacaggcttctgatttctacagacttcagactcttagaaacaataaaagctcctttcaaatttatttcttccattgttaaaaaatttaaaaagcaaacaaataaagcagagccttctctggatcccatcccagtttttgctcctcctccccgccttccaattctattactttatcttcttttccagaccaagccactaggggaaaaaaataataattctctacttctctctacccattcactgttttttttttctttttccccaggcagacaactgaattaggggatttattctacccaggctatactcagctacaaatgataggagaacccacctagaatggagcagatgcaaggcacacaggtgatgattttagttcattgcaaggtgggtgttctgtcagatgtgctctggacaataaaggatctgataatggaggtgaagtatcaggtgtgttggttgagtgagcaaattcccagctagcagcacagtccccagcacttgagtccacattccggctgctgtggcctcaatgcactgctcaaggtctgtttccttgaacccctgccttgcctttctcctcttgtcattcatttagcttacttttcccttcctctgattgaccctcatggcaaggaggtattagccagagtggaattagggctgggggacacctttttgtctttaattcctgcaaacctcactggcccactcatttgaactgatccgttttctccaactgcaaaattgaaaacatttactaaaaacatcttccttaaatattgtgaattccttactattgatcacactgtcttcctttctcttccctcatctctgacctttttttcttataaaagtggtcccttaaaagccaaagtttcatgtttctgtcctagaggtccctagatctttgtcttcctcattaaatgattaattcaacacaatattagtcatccaggaggcactcattcaatgtctgttgaataagtgaataaacatatgataattgcctacactgataagggtctgaccacaaagggaaaaaccagcttttgtctttgggtggccatccaaaaatccatggcatcaatgcatggatttgggagagggcatattggaggatacaagaaagaagtataattttcatgatattgtcctagccctcaagtcaccagaaaactaatatgtttaagaaaatgtgaaccagtgccactttgtgcagtgctaagtagaaatggactgaagtccagaaatgagaaagcagactatatggggccaagtccccttagggcttcatgtagaagcaactggaaagatgcagaagatccagacaggaagaaagagcaacatcccttcctaaaggaaagagtgagtgaagaaatcctcaagttccttgttagtctgtgggctaaaaacaccaatgaacttgaaaaacacaattagcattaatatgtgattttcaaatataatttccatgttcaactttcaacttcaaatataattttacttgtacctccacataaaacagaagctatacatgagtgggaggtcatttagtgggtgttggaaacagaatgaggaggacagaggacttcttagacctagcagggggaccatgagaccatctcatctcaaaagaccaggagatccaagcactcatagaatctaggcactggaagagcctaatgcatatccagcccatggtcccaccaatatccttgacagattgtggggtcgttcaacctcactcagaacatgaccaataatgggggagtgactggagcaaaaaaaaaaaagaaaagaaaagaaaacttcgggccaatatccttgatgaacattgatgcaaaaattttcaacaaaatactagcaaatttaatccagcagcacatcaaaaagcttattcaccatgataaagtagcctctatctctgggatgaaaggttggttcaacatacacaattcaataaattagattcatcacgtaaacagaactaaagacaaaaaacattattatctcaatagatgcagaaaagagttttgataaaatttaacatccattcatgtttttaataaaataccctcaattaactggctattgagggaacatacctcaaaatagtaagagctatctatgacaaacccacagccaatttcataccgaatgggcaagtgttggacacattcccctttgaaaaccaacacaaagcaaggatgctttctctcaccactcttatttaacataccattcgaagtccttgccagggcaataaggcaaaagaaaaaaataaatggcatccaaataggaagagaggaagtcaaaccatccctgtttgcagacaacatgatcctatatccagaaaaacccatagtctcagcctaaaagctttttaaactgataaacaacttcagcaaaacctcaggatacaaaatcagtgtgcaaaaatcactcacattcctatacaccaacaacagtcaagccaagagccaaatcaagaacaaactcacaatcacaactgccaaaaaaagaacaaaatacctaatgtatagctaagtagggaggtgaaacatctctgcaaggagaactacaaacaacggctcagagatatcagaggcgacacaaatggaaaaccttttcatgctcatagatagaatcaatgtcattaaattatcattaaataataatgattaaaacctgaatggtaaaaaaattatcattaaaataaacttctctctgactttcttaccataaaaactggccataaagaatgatctggcctacctttttggactgtagatcagaaaaccctcattccagagagtatcctgccctatacccagaaggaagaaatgctgctcagagaggccaaaaaggatctagaaagacgggcttttccgggtttccccactatgtctagtagcattagatcacatgctttctgtccaatcatatttctacatggctttcctactgtgtcggacctaagcacaacagtagacaattttctttgtatctttgtgtcttcattctgaaggtctcaatgtgcacacattgaataaatttgtatgcctgttctctaattaatctgccctttgtgagctgatttttcagggaaccttcagagggcaaaggggaacctatattctctggttccctataaaagaagaagaagaagagaatcttggaaaggtaagacaagagcagccaaagccaggcagaataatgtaagaaaacccagaaggagaaaatgccagatgctgaactaaggccaggttgcaagtttgccactagaatgggcaggagaagaatcctaaggaccccttgggttatggcagaaggaggaaataggagatgccaagaagggggtgacctccatccattccaggagcctaaatattgaatgcaagcatggaggaagcctgagtccagaaagaaaagcaggagagggccggatctgcctggagctcagaaaaggattcctggggatggtgccactgcagacaggtctcatggactggggggttgcagcttttactaataaaatttttaattgggggaaacaaaaggaaacttgagagaaggtgcacatcttcccttcttcctgcacataagtgactacccatgcctggctaagagcttgcaagcttaatcaagatacaataaccaatggtcattattgggtggggaaatgaaggtgcttgtggttatgaacagctccataagcatgaatccaggaaagagtggctctaagggatttgggctatagccttattatcagagccattcttctcatctttaaaataacctggcagggccttccaatgatcacattgtggcaatggtaattcagctttgtcacctctgctgtgatgacctgtcagttggttcatatgagctccaggagcatctagggagcccagaaggtgctgagccatccaaggaagatgaggttcaggtggaaaggtcaatggtgacatttcatttcaagagatctgaaagggatcacttccctttgacaaatgtctttgtatctccccgtgggctagaagaaccatgattcatacaagatctgagtctatggaagtagaggagttcagtgaagaggggagatggagctttataagttcagtctaaacattatcaaagagggggatacaaaaatctcaactgtgcaggaatcaaagactagagtacacacccagcagcaaggaaagccctggagtcacatggaccacctacagaatggggccacaagtgataggcaaatggcgaaagtcagtcatgctaggtcttgaagggcccattgacctcaggaattcagaagacgctcagccctgcctgtgtgatggagcactgtgatgaagaagtgggctgggagacaggccatctgcatggtagaactggctgctctgcatgagctgtgccagtggaaagtcacatggcttctctatgcttccatgtcttcctctgcatgacaagaataagaatatgggcagcttttaagggctgtaggaagtattcaataatataacgtgtgtaatgtgcctggcaggcagtaactatttagtcaaaattgggttttattacttcttactctatatatagcaatctgaggagcatggagaagttttatatgttcatttatccttctttggagcaaattagtgaagctggctcctctgcaccccacagtccttcccctgtcagtggcctgctgacttcccttgcgcttctttgtctttctgtgcctgaggaccttcctgggaaccatgtgtacagcagcctggaagtgctggaaattgccactatctgggaaagctgtcaaacaatgatgattccctttcaggggataattctgaggcaagtgctgttcatatttagtgactaaatatggctccactaggcttggaaatgtgtggtcaaactggtgtccctatttaacatgttgaggcacttggatagctcttgctcatggaagcctgaagcccattgacaggagctttggccctaatgtaggcatcttctcccacccttcctgctctctgcagcaggcatggatggctagatacctgctgtagtcttttctcacactgcactcaacatacctgtgaggccagtcactcagcaaagatgagctgagtataatggtgtttgcattcagcctggacctgatggcaatatttccatactctagtagagtttattagtgatgattgcagttattagcaatgattagtatgtcgttggtactatcagaggcttcttcgggtcacattgatctatcagtgctagacacatggtttcagcagctattggctgaggggaaatgtttagtggccaggaaaaggggcaaactggacttgtgttatatcttctattagctgtgtggcactgctcataccatctctgaacctgtttccctaaaccgcttatctcttatctggttataaatcaaaatagaaattttaacagacttcctaagctgtgtagggcagtattcataagcagatattttattattgttatgcctctgacaaagcccagtgtattctttttgaggttataaaataaaattcctacagcatttaagcaataagtaaaattgaacagatttaaaaaataaaactggtggagtttacaataaaatttgtataaaaattatataaaattatataaaataaaaattataaaattataataaaattatattattagtttaataaaactaacaatattaagcaggtaatataaataagtacacttgaacagatttaagaaaataaaactggtggagataataaaaacttaagggtgtatgccctgcctgaagacattcaaatttaaacaaataataatactgtgctattcaaacaaagtatgatttcaggccaaataatgccagtgtgtgattttttatgagttcctccaacatgctcaaaaaactacttttcaagatacaaatcccattctatcccagaatcagaagaccaaaaattttggatagattaatgaatgaagtcatcagctaaaggctgatctttttctcagacctgaaggcctgagttttattccctgcagcaaccaattgagccatcatagctccgtagctgcacatgatataggagagttgcctctttggtaaaaatttatctccaaaaagcaggggactaccattcctgttaaagtcccacagttgtctctatgccaagcatctataatttcttcaattattcaactgccctccctggaaatgttgacagcaccactttcacctgcatttctttagggaatcacagatcttacttaaatgtcctggtaactaacttttttttcacaacaccacttcactaagctaaaaaaggacattgccttcctctctttagaactcaagctgaagctcctcattgacaacctacttttgagagtcctaattgaactatgatctcaatactctctccctgccttcaggctattcactaacaacacctctttatccacacctgactgatgcctggactctctgagcctctgtcaggtcactgtatttagttagttgtaatacaaagaaagcactctccctaaattttctgtcatgtggatttcccccactgcatcatggataaaaatccttaggagtgtatataagaagggcgacatgctcagcagttaagaagggctaagtgccttgtagaggacttacatgatcaggtgaagatggtggggaacatgatctcttttccagcctttcagacatgaaataaatgtagactgtcttgctctatcatctagctcttcaagaaaagcagaaaatccaaaattttaaatctggggaacaaaaatatgcattcaaaaatacacaacaaaaaatgcaagagtatttttaaattttgcctaatagaggaaaaccaaaattttacagaaaatatctacaacaaactgggtggccaggtatccccatcaacccgaaaatttggacagatgggttaaacttcagacaaaacctcatggcatcaccatcttcttggaagaaggtgggagaaatgcagcagcttctgatggtcctgggagcatggaatcaatgccaccagcaggtgctcacaggatgcgcgtcaggtcagcctgaagcagcttctgaaaatgtgagcacgctcttcaggctccaatgtataaggatggctccactagaaggagaaacttttttgaatgtatccatttgatttgctttcattgtttacaaaaacattattctacttcatattctcttctataataactttgttttattttttattttattattattatactttaagttttagggtactttgtatgtgatttgactgcagttattgtgtcttgcttatttttaactgaaaaaaattttacttgaattttgagaaaaatggaaagggccaggagaaaattgctaattttatagctttaaagctacctcctcagttctttgcatgaaatctgtgtcttctgcttcaatttgatctggaccttattcaactcatagtgaaagaatatatcatgtaccttagaatattaacccaggacttttgactgaaaaacaaattttggtaaaacaatttaatttaaaaagtaaagaaaaaattattagagcttctggataaaatgatcaagtcacacataaaacaaagaaattcaggatttgggtgtctcaggttgggtttccctggaacagacactgaggcaggatttgtgtgtagagagtttattgaggggtaacctcagggtaaatacctatggggaactaaagaaactagggagaggagttgaactgtacctcagccacaaggatctcagctaatctcacatgtccttctagagctgagatggcccttcagagcatcccaccttgaaacgaggggacaggctttttatccccacttctaaattagcgagtcattgggcgaggactgtcaaaaaggaggagacatgtcctcggatgaaatgcctcttttcctcagaggacacgtcccagacaggaactcacctgagcgtggtcagctgccaaaactcccctagcacgtgtgactgcatggtcctgaggggacctgggggtgcacgaaaccattcaccacagattgcgtttaaactttttaaagcaatgacttatgccagaataaaatcaggaaatacattagaagtactaaggaaagaaagtgtgggccatagtaataactaaaattaaaaatggggggtcaactatggctattataaagcctgaatagtgtaaaatgcctgcagagatacattaaccgttctaaatataaaatgtgccaaaaaagagggcaaaatactcaaaatctagcagcctaaaacagcaagcctttcctgtctctcaacatgtgtggggcggaaatctgggtcatcattaacttggtgcctcctgctcagagtctcccgtctggcagcagagtgctgggtaggcgggcacttcagcctccactgaaatttacctccatgctgagggaaggcttcaggctttttggctaatgacatcacattcctgatcagtggacctctccacagagcaactcacaacaagcaatggcttccttcagagaaactgtcagaaagaccacccaagaagacagcacagcctctttgtaacctgatctccaaactgtcatcccatcctttttgccttattctattatttcaaagtgaatcctaattctggcccacactcaaggagagattacacaagggtgtgattatcaggaggtggggatcattaagcagtatcttagaggctgcctgccacaacttgtgaaatatagtgccccatacacatgtaccattattatgtgtcaatcataaattttaaaaatacagttttttaaaaatttaaaaatttaaacattattctgctttttaaaaatagaactgtacttcagattagcctaatatgactatattaagaattaatataggccgggtgaggtggctcacgcttataatcccagcactttgggaggccaaggcgggcggatcatgaggtcaggagatcgagaccatcctggctaacacagttaaaccccgtctctactaaaaatacaaaaaattcgccgggcgcggtggcaggcgcctgtagtcccagctactctactcgggaggctgaggcaggagaatagcatgaacccgggaggcggagcttgcagtgagcagagatagcaccactgcagtctggcctgggcgaaagagcgagactctgtctcaaaaaaaaaaaaaaaaagaattaatataaataaatacaataaaaatataaatataatatattaatataatatataaatataattaaaatattccccatatttcagccaataataaattaaagaatctagacaatgaccatcaacgatgcctaacatcataacaaagatagtttgacctgaggtgcttactgaggcagatgcacagcttgacctattttgcagtcttcccccaaaatcatcaaacctaaatctaatcaagattctagatctaactacttatttacaagaagtacagaagaaacaacactataagtaagcaattagcatacttcagaatgtgggaaactacggtaactactgatttcttcaacaaaagaatttcaaggcaaaataaaagagaaagagatggagaacttatgaaaagagacatcaaaagagtcaagaaaaacatcaaccagttgcaacatacggactttacttatattgtaattcaaacaaacaggtacagttataaaacaatcaggaaactgtgaacactaacatgtaatggtacaaaaaattattgggatttttaaagtataaaataatattgtgattacaggttttaagaaatttcttatcttttagagatacgtttttagttacagataaaatcgtatgatatttgggatttgcttcaaaaataatctgggtgtaggtcagttggtgggggtatagatggtcatgagttgaacacttttgaggctaggacatgggacataaaagtttatttcaatcaaacaaagtcattgtaccgggaagaataatacctgtgtaccaaatgtggtcagttgaatatagttttgtgatctttggtctatacacataaaatggcttaaaaagttaattaacctgtaccactcaattcattaaacatttagtgtgtgtaaatccttgttaagtttgcatgaattgaatttttatttgagacagggtctgtctttgttgcacaggctgaagtgtagtggctaaatcatggcttactgcagccttgacctcctaagctactactgccgctggcactttcttgcaagtgccaccttctgactggagaccaacgaacactgtccattacaacatctccaggcagaataacacggtgtccaggaaggagaaaacatgggcatgacctcagctatcaccattgcctgcaccatcctggctaaccaggaggtccctagtatatccatgagatctgttcattactaccacaactggcatttgagaaagccaatatacagaggctatctataaccaaggaatctcacagagtctatgtcactcccctgccaaccccatcagggctggtgctggttcccactactgggagacttaaggataggttacatcactggatcccttgaagacattccacagcaccagcctggagtgtggcagcgacacaaggcagctagactcagaggagcaacaacatgtgcagtaacctggctctgagagactccgactcctaggggaagagggagtgaaccacatgaaaggaaccctccataggacaaaggaactggacagcaggacttgagtctcagatcattccactggtgggaagtgtctttcagcagaaggtcagttgtagtgcgaggctcagcagggaaagtctgcagctctctccagctgccaggcagttctggtgctcatgaaggagcttggagaagaaggctttttcccccgcatccaccactgcagacaccgctggggcttttcccattggaaggcggtgtgggtgcacctatagacagcctctctggaacacttcagagcgactgcatccccccaggaaaagcaccatccacgtgcgggcctgcacaaggggtagagtcacaatttctttctacttggaacatcaccactcccacagatataaagaggcacctgtctgatctgaatagctggaacactggttatggagtgtgtctgggaggtgaatagcattcctgccagcctgggagaagagctgaggtagctctggtccttccctctgataagacctccgtgtgtttcactgaaagctcccccatccactctgtaaaagctgagacctctgcccatgaaagggtactgcatctgcccacctgctttagccatagacaatttctacctgtggatgcctcctctattagcccgaagcctaaattattcaacccagtaaataaaatactagggaaattagaaaaataaataagcgcacaccacagaagagtgaaataagcttcaagagacctctgccactccaatcccataggagagaatgaacttgctcacgcaccaagcacattgctactacaataagcatccaagaaaggcatcatacaaagactgtctgtaaccaaggaactcttacagagtcttcacctctgaaagcactaagagccaaattagtttgcaataaactgtaaatgttaaagtcatatccttaaaggggaaaaaattaaaaaaaaacagtcaaataaagaataaatgctagaataattataaaaaatagtctatccaaatgacaaggaaccagaaaaataaatctggcaatatgacaaatcagggttctataacaccccaaaagatcacctcagccctctagcaatggatgcaaaaaaagttgaaatatttgaaatacgagataaagaattcaaaaggttgattattaagctactcaaggagataccagagaaagatgaaaaccaacaaaaagaaatttaaaaaaaaaactattcaggatataaatgaaaaattgtctaaagagatcgatattttaaagaaaaaccaatcagaacttctagaaatgaatggcacatttagagaattacagaatgcagtgaaaagttttaacaatagactagaacaagcacaagaaagaatttcagagcttgaagacaagacttttgaattaaacaaatcagataaaaatatagaaaaaagaatcaaaaatataaatcaacaaagtctccatgaaatatgagattatctaaaatagccaaagctaagaataattaatgttcctgagagagaaaagagagcaaaaactttgaaaaatgtatttgagggaataatagaggaaaacttccctggccttggtagagatttagatatccaaatataagaagctcaaagaattcatgggagatccattgcaaaaaagataatcacaaaggcatatagccatcaggctatctaacatcaacatgaaaagaagaattgtaagagcagtgagacaaaagcatcaggtaacctataaagaaaaacccatccaactaacagaagacttatcagcagtaaccctacaagccagaagggatgggggtaatgttttagcctcctaaaacagaataactctcagctaataattttctatgcagcaaaactaagtttcataaatgaaagagaaatagtgtcattttcagacaaatactgaggaaatttgttactatcaaaccaaccctacaaaaaaatggtaaaaggagctttaaatcttaaataaaaagcttgatgtgcacaaaaataaaaccttttgaaagcataaaactcacatggcctacaaaacaataaaccaatgaaataaacaacagcaaagtattcaggtaacaactaacatgatgactgtaacagtacctcgcatcttgatattgttaaatataaatggactaaatgctctacttaaaatacacagattggcagaacagacaaatatcacaaataaaatatttgctatcttcaagagactcacctaccacatcaggattcatataaactcaaggtaaaggggtagaaaaagacattccacataaatagaaaccagaagtgagactaaagcaacaagaatagaaaaataaaaagatggtcattatttaatgataaaagaatcaatccaacaagcggatattacaattctaaatttatatgcacctaacactgaagctctcagatgcataaaacaattactactagacctaggaaattaaatagacaacaacacaataacagtgggagatttcaacactccagtgacagcactagtagattatcaggacacaaaatcaacaaaggaagaatgaacttaaactgcattctagaacaaatgggtctaacagatatttacgcaacattctaactccagaatagaacaagaactccagaatatacattcatcttatcagcacatggaacattcaccaagatagaccatatgacaggtcaaaaaacaagtctcagtaaatctgaaaacatcaaaatcatgtcaagtattttctcagacctcagtggaataaaactagaaatcaactccaaaaggaatcctcaaactatacaaaaaaatagaaattaaacaatctgctcctgtgtaattttggagttaacaatgaaatcaagagggaaatttaaaaattatttgaaattaatgataatagtgacacaatttagcaaaacttctggaatataacaaaagagtgttaggaggacagtttataccactaaatgtttacatcagaaagtctgaaagatcacgcacagattgacaacctaatgtcacacctcaaggcattagagaaacaagaacaaactgaataaaaagctagaggaagaaagtaaacaacaaagatcacggcacaactaaatgaaattgaaacaaaaaatacaaaagtttgatttaaaaaaaagctggttctttgaaaagataaaccaaactgacagaacattagcttgattaaccaagaagagagaagattcaaataagctcaaatagaaatgaaactggagatactgcaactgacaccacagaaatacaaaagattattcaagatcctatgaactgatctatgcacacaaactagaaaatttagaggaaatggatgaatttctgaaaacatacaaccctcatatattaaatagggaatacaaaccttgaaaagattaataagaagcaatgagattgaatcggtagttttaaaaagccaacgacaacaaaagcccagggccagatggattcacagctgaattctaccaaacatattggtaccaatcttactaaaaatattccaaaagaagaataggggaaatactccctaagtcattttgtgaagcaagtatcaccctgatactaaaaacaggaaaagatataaccaagagaaaaccccacagaccaatatccttaatgaacatagatgcaaaaatcttcaacaaaatactagctaaccaaatccaatagcacgtcaaaaaaataatataccatgaacaagtgagttttattccagggatgcagggattgtttaacatatgcaagtcagcaaatgtgatacatcacataaacagaattaaaaacaaaagccatatgatcatctcaatagatgcagaaaaatcattctataaacttcagcatcttttctgataaaaccttcaacaaactaggcatagaagggacttacctcaaatgaatcaaagccatctatgacaaacccacagccaacatcatagtgaatggagaaaagttgaaagctttccccctgagtactggaacaagacaaggatgcccactttcaccacttctgttcaacatagtaatggaagtcctagccagagcaatcaggaaagagaagaaaatatagggtttccaaataagaaaaaaggaagtcaaactactactgtttaccaatggtataattgtatacctagaaaaccctaaagactcctagatttgataaaggagttcagtaaagtctcaggttacaaaatcaatttacacaaatcagtagcactgctgtacatcaaaaacaaccaagttgagaagaactgaacccctttcacagcagctgcaaagaaataaaacacctagtaatatacttaaccaaggaggtgaaagagctctacaagcaaaactataaaacactgctgaagaaaacacagttgaaataaataaatgaaaacacattccatgctcattgattgaaaaagtaaatatcattaaaatgaccatactgtccaaagcaatctacagatttaatgcaattttcatcaaaatacatcatttttcacaaaactagaagaaacaattctaaaatttattcggtaccaaaacagagccccagtagccaaggcaatcctaagtaagaaaagcaaaagtagaggcatcaaattgccagtgttcatattttaccacaaggctgtaattaccaaaacaacatggtactggtatgaaagtagacacagagaccaatggaacacaatagaaaatccagaaatgaagccaaatgcctacaaccaactgatttttgaaaagcatacaaaaacataaattagggaaagaacaccctatttaataaattgtgctaggaaaactggctagccacatgtagaattaaattggatctctatctctcaccttgtgcaaaaatcaactcaaaacgtgtcaagtacttaaatataagaccccaaagcataaaaattctagaagataaccttgaaaaaactctcctggacattggcctaggcaaagaatttatgactaaaacctcaaaagcaaatgcaacagaaacaaaagtaaataaatggcacctgactaaattaaaaaggttctgcacagaaaaagagataatcatcagagtaaagagacaacccagaaaggaagaaaatatttgcaacctgtgcatctgacaaaggactgataaccagaatatacaaaaaaagaaaaaaaacatctcaaatcttcaaggaaaaaaataattccatcaaaaaattggcaaataatatgaatagacatttctcaaaacaagatatacaaatagccaacaaacacgagaaaatgctcagcatcactaatcatcagggaaatgcaaattaaaaccacaatggagcaccaccttgctcctgcaagaatgactattattaaaaagtcaaaaaaaaatagatgttggcatggatttggtgaaaggggagtgcttattcattgatggtgggaatgtaaattagtacaacctctataaaaaaacagtatggacattctttaaagaactaaaagtagatctattattcaatccaacaatctcactactggatatctacctgcattagttcgttctcacactgctaataaagacatacccaagactgggtaatttttaaaggaaagaggtttaattgactcaaagttcagcatggctgaagaggccacaattttagaattgtttctcctagttttgtgaaaaatgatttatttcaaaacttacaaccatggcaaaaggggaagcaaacacgtccttcttcacaaggccacaggagagaaaagtgccacgcaaagggaggaaaaaaaccttataaaactatcacatctcatgagaactcactcactatcatgagaagagcatgagggggacctcccccatgattttacctcctacaaggtcactccccaacacgtgggaattatgggaactacaatcgaatataagattcgggtggggacacagagccagatcatatcattattccaaagaaaacaagtcattatacgaaaaagacatatgcacatgaatatttattgcagcctgattcacaattgcaaagatatggagctagcctaagtgccattgaccaataaatggattaaaaaggcatgatatataaatatatatatggatatatatatggatatataaatatggatatatatatgtatgtgtatatatatatatatacacacacacacacacaccatggactcagccataaaaaggaacaaaataatgtcttttgcatggacttgtatggagctggaggccattattctaggtgaaataactcaggaatggcaaatcaaacactgtgtgttttcacttataagtgggagctaaacagagaatacacaaaaacatatggagtgatgtaatgaatcctggagactcagaagcaggagattgggagggagggtatgggataaaaaactatatattgggtacaacatacagtacttgggtgatgagtgcactaaaatctcagaattcaccactatataattcattcatgtaaccaaaaaccacttggagatgggcatggtgactcacgcctgtaattccagcactttgggaggccgaggcgggtggatcacctgaggtcaggagttcgagaccagcctgcccaaaatagtgaaaccccgtctctactaaaaatattttttaaattagccaggtgtgatggtgggcgcctgtaatcccagctacttgggaggctgaggcaagagaattgcttgaacccaggagacagaggttgctgagagctgacacagtaccactgcacgccagcctggtcaacagagtgagactccgtctcaaaaaaaaagaaaaaaaaaaaaacccttggaccccaaagctactaagtgtttttaaaaaatcaaaagtaatacaaaataaaggataaataagtactgcaattttttaatttgcaaattttctctttattatgtttttcaatgttctggttacagaattaatatttcttataaaaattaaaatgatacatgaaattttttaaaaagatacaagaataactccatgcctttaagaaaaatgtgatacagtgacaaaaataaagcacatacacataatggctcaaggaagcaagtgattcatgacatttgattgaagagcccaagatttcagaagaggctattgccttctgcagaaggcaatgagaaataatgccaagaaaagttggctagtcctgaagggtaaacatcatatggataggaagggagaggtcatcaagggtaatccagacaatgagtgacatgatcaaaactgcagaagcgcaaagacaaagagtgtgcttgttgaataccaagttgtataggctgcagaagaggaagtggtgggactggagtctagagagtcttgaacaccaggtttgggaggctggagttcacttggtgagcaacaatctctggcagaggaagactccgtctcaaagaaagaaagaaagagagagagagagagagagaaaggaaggaaggaaggaaggaaggaaggaaggaaggaaggaaggagggaaggaaggagggaaggagggaaggagggagggagggagggaggaagagagagagagagaaaggaaggaaggaagaaaggaagagagaaagagagagaaagaaagaaagaaaagagaaagacaaagaaagaagaaagaaagaaagtagaaagagaaagaaagaaagaaagaagaaagagaaagaaagaaagaagagaaagaaagaatgaataagaaggaaagaaagaaagaaagagaaagaaagaaagaaagaaagaaagaaagaaagaaagaaagaacgaataagaaggaaagaaagaaagaaagaaagaaagaaagagaggaaagaaagaaaagaaaaaaaggaaaggaaagaaagagatcattaccagctgggcacggtagctcatacctgtaatcctagcactttgtggggccgaggcgggtggaccaggatcacctgaggacaggagttatcattttgaaatcagcctgggcaacatagcgagaccctgtctctaaaaaatttaaaagaatgaaaaaaattacccgggtatggtggtgtgcatctttaatcccagctacttggggggctgaggtgagagcattgcttgggcccaggaggttgaggctgatgatcacaccactgaacttcagcctgggtgacagagcgagactctgtgtataaaataaaataaaataaaaataaaagtaaaataaaataaaattaaataaaaattgcctgttaagtcactatgagaaagcaaacaactatttaccagaaacaagagacattgttaccaagactatgtcactaaaataacaggctacagggaggctagtttgaatattgtatataaataatcacattagattacatttgatcaagatacggcttatataatccctgtatgatcttaaatcagagtggaaatatcagaacaataaatttgcctgcatctaatggttttgccaaacaatagagtgagaagtagaggtcattcagggtaggaattttatcaccagccaattcagatatgtctggtgccttgtcatggtttcacctgaattatcttttttggccataatttcaccaactgcattagattatggcaggctactaatacccaaatgttctgtgtgttttggtaatatgagaatgtaatacagaaggtagaccaaaaagaaaagatagacaaattgtatttaaaaagcaaaaggctgatgaagattatgcttaccaagtgccgctcttaaggctgtctagccaataagttaaaaaaacagtgagccgagatcgtgtgactgcactccagcctgagcgacagagcaagactccatctcaaaaacaaaacaaaacaaaacaaaaaatacgctcaccggcttgttttgggggtcatatgatccaataggaagaagacggacttcagagcaaaaccaccctggtttgatcccagctccttctctagtcagctatggacatggggtacttacttaacctttctgaccctccattcattcatggcaatttggggtttatcgcagcatatttgctgtaaaaactgcatatattgtttcattcaaagtacatacaacaggtctggaattcaatagatggtcatctaatgttagctccttcctcctcatcctttttatattgattctgaaagagatcttattgtataattccttatgctatgagggaaatttaaatacaaaatactaaaattttcacataagaaaatcacagtatgaattttacttatttcaacttttagacacataaaagacacaaaattcaactaaagcaagctatgattattaatgaggaaatgaataatgaatgcgtgggttgagactgcgtaattggaaatggggcaaaaggactacggtttcactttccttcaaaagtttgatttgccaacttaacagaaacttgctaacaataaccagttttagaagctcctggccacagtgaaagcaaacccagtccatgtgcctggttcatgaaaggctaagagttcggggagaagatggggagagggtgtgactgagacacatccagagagcacactgtgcctctcacatgtactgcctggtggcttcactctcgtgggtatgtgtacccgcactcaaatgtaaataccaggtcccaatctcacagggctcttgcgggtacacaattaggagctctgagtgcacttggaggaagataaagaatcccaaccggcaaactttcaagtccatcttttttttgtttgttttgttttggtttggtttatgtgttttttgtttttgtttttttattatactttaagttctagggtacatgtgcacaaagtgcaggtttgttacatatgtatacatgtaccatgttggtgtgctgcacccattaactcgtcatttacattaggtatatctcctaatgctatccatctcccctccccccctccccccaccccatgacaggcccgggtgtgtgatgttccccttcctgtgtccaagtgttctcattgttcatttcccacctataagtgagaacatgcagtgtttggttttttgttcttgcgatagtttgctgagaatgatggtttccagcttcatctgtgtctgtacaaaggatatgaactcatccttttttatggccgcatagtattctacagtgtatatgtgccacattttcttaatccagtctatcattgattcaagtccatctaattgtaaagtcttctaaaagagtgttgtcctatattgtaatcacccagcactcagagatgaaatcttcatgaaattagcgtactctctccacaagtgaaagcatttatggctgtgcccccagtcagtaaattatagcagttggtgctgagctccaatgctgtttcccgtgctggccctgccccttccacttgttcagcaagccccacgggtgctgtgtctgattcgcagagaccattcactggtccatttctctctcatctggtggtgtcctcttccccaactatttgaactcaatctctaaacatttgtgccaccttatctcttgctttggtctcagctgggcaaaactttactgtttttcagggccccagctcccacctgaatttgctgtctctcagcctcaatgcctgtagaattccaagattcagaactcactgtggacccaagcagccatggcaatcttccaggaaatgatgggcacacccttgtcattataggatgagcactgttaggataacagaaaagaacagagagttcctaggggttattttgtgcatgatatatttattaatgatgggcttattctgtggcttaggaaatgatctccagtattagttgaatgccatgcagaaaaacaggatgttggcatctctgcacacagtagatacattctaagcagggtctgttcaataggcaagatgaatgtggctctctatccctcagtgtttgccaaagctaacagaaagggcaaaggctaacaaaattctgagggagcccagcaaagatatggtcttggtgaaaaaaaaaaaaaaacactgctaaattgcctgagccaatactctattttgctcttactgcagcatagaaaaacattgagactaattctgtacagctacactggagttcaaatagtgaaatcctatgagtagtggaaattaattcattcaatttccattttcaacttgtatggtttttagcttacttttgccatacttgaactttcaaaggagaagctttgttcataatagtcataaactggaaacaaaacaaattttcaccacttggaaaatgaataaattacagtgttttcataatgaaatacatatattcagagcaatagacagaacaaactgcaatatagagatgcacaagaacctggctgaatgttaaaaatatagtattgtgtaaaagatgctgaagaccagaagtttgatcagtatggagtcggcctattaatatgaaactcacaaaaaaggtaatagtattgatgatgatggaaatcagcatataattatctctgcaggattattaagtgaggggaaggcactgaaagctcatatgtctcaggccgggtgcagtggttcaagcctgtaatctcgcactttgggaggctgagtcagacggattgcttaagctcaggagttcaagaccagcctagacaacatggtgagacctgtcctctactaaaaaaaaaattaaaaagttagccaggtgtggcggtgcatgccttactgatccatttacaacctggcaggatccatgatgacaccagccgtttcaccaaatgaaacaataactcaagaggacccttggagtgacgtggcacctgctggcctcccttgccttttctgcattccaaaccctttattcaaagatgcctgtgttccctccacaaactaaagagtggaatggtgctctgctctttcccttgccagcatggatagtaagggaatcttgcttcctcttatcataactcgtgattggtttgacttgttttcacaagcggtgagcagctggacccctttgccggttacaatcgcttggacatatgtttttaattatgatgacttctaactatggagctctttaaaaggaaagaaagtccgctcaagtctcttattaccagatgttagctgggacaaacagctgatattcctggctcctgaacctttaccaaagcaatctctcaagtgaaactagtaagcctcaaccaaggttatgacttaactgaagacacgagaggcatctccacagagttgcaaagcagtcctcacaagactcagaatcactgaaaggcagctcaaggaaagtaaagttctgctggccacaaatgggatacaccttacattttgttcagccattttctctagggtctcagcttcccagctactgtctacacacagaggccccaaagccctgtaagcctccacagattgaagacaggaaatcaaaagctgttcctggaagaaaaaataatcaataaatggcaaaagtcacacaaatattaaaccaaaaggactgattccctgattctgaattttaaccacgaaattacagtgtggaccagcttccattgttaatcccacatggactccaagcaggcagcctgagtgggcacagggtttttagctttgttttaggtcattttggtctgtttgtcaaaggaattttaagggtggtcatgacactatttatgtcttttgcttttttgtttatttttaaacttgatcctaccatcttccttaaccatataagccaataaggctcattatggtggctgatcagagattgccccatcagaactaaggctctctacaccctgcccttagaactttgcttctgccttagaaggtatatatataaataaaactaagtttctctataccttcactcactcactgggtgaaggagtctctttgagtgctcttagcatgagtgttcccacaacaccttatctttatggaccagctgagtctgactgaactgggaaggacccccaccaaacccggggccaacagggaaggtcccctgcagggtccagatggaggaaaccagaacagggactggggagagaccaagatgaaatgaagggaagaggtagagagaaataaagtctctgaaatcttcaaccttaaagcaggagatcctagatttagaggaacttacatggtgtctttccagtgcagtgggagagacaactgacctgtaggcctctgtgtggtgactcccagtgatgccaagagaccctggggttctccatggatttcatcctcattaccagatatgttcacttaaaaatatacaatctataaatttagaaaagaaggagaggagactttatttcttataaagggttacagtctgcagggtggccattctaacagactgggaagcagagcctccagtcagaagccagaaacagacatttcagaaattcactctttacatgctcaacccggcatcatcaccttgatctgcttgggtttcctatccctacactgtcctctggaaaactcctccagaaaaaaagctggggcatagggccctcctcacttgcctcccatgtatctggaaccataattgtacactgtcagcattaccaatgcaggcacagtgcttttatatatttgtccaatgtcatcacggtctatcacaggacaatgagttcagtacccaaaactatattatgacctgaagaagagctcctactaaaggattttaatcaagagagttctataataccataagttatagtttttcctcctccaaaatttacaattagtagcagggacaggtcttgacacagttaacacaaggaagactagattaaatgcaaaatatatccaaaaacaatccactttggaagatgttaaaccagccatgtgctatcttgttccttaattggcaatatgtgcttctcaatcttgccagaatgtaggtttctcagtcctgctcctcttctatctttagaatcagtgctacatacacccctaggaactcaataaagacacacacgtcagtggattcgcactccaatcaaggagctagatgcatggtccagtgcaataagaggagcctagcttctccttgacccttggatagatcacccccaccttagaacaggatggtggagactgcaaaaatgttctccaaggtcctggtgagaaagcctctacatcagagaccttgtctgttaaatagagagtgagtgtagccctcacagagtgaacagttgaattctcatttgtcatattctgcattagaatgtagtagagtaattatgaattaccttttcattatgtatgtcaccccacacatcttcctatatcacccagcattaaaacacgctgattgaaataagaacactccactttaaagtgcttgtctttatgcacagtgccctagaacaaaccagccaacctctttaagtctcaataatttgatatcttaaaggcatttattcaaactcttattgcatcattggtccatttcttttccttatcagctctgtaagttacccaggccaaaaactctggtctcagtttaaaaaacccaaagttcagcaacttgaaacgtgaatttaaacagaataaaagctcatagcagtagggatcctggctcttacttttccttataatggagatgaacataatatgtgccctaaatggattgactgactgattgatggataactgattgattcaccgccatgtaggaaattatatgcagatctagaaccaaaatatctgctatctcatttttaatttcaaaaatctaattgaaattggccaactttatcccacaacagaaacattagcaccaagcctaggatgtataggggtgtattgagaaacaaagatgagattgtctttggttaatggtttcttaacatttcttcctttgccacttccatctaaacacagaacaaaatggaaataagattatatgggatagggctagagaaaagagagagaagtaaatgtataggtttcttcttctcacttttttttttttttttttttgagacggagtctcactcagtcgccgaggctggagtgcagtggcgtgatctcagctcactgcaagctccacctcccgggttcatgccattctcctgcctcagcctcctgagtagctgggactacaggtgccaccaccatgcccggctaattttttttgtattttcagtagagacagggtttcaccgtgttaaccaggatggtctcaatctcctgacctcgtgatccgcctgcctcggcctcccaaagtgctgggattacaggcgtgagccaccacacccagctcttctcacttttagtctactaaatatttgtgtaagaataaagtttacaaaggtaagagagtaggtcataacctctttcttgtactctagacaaacagacagacagacagtgaggctgtgcttggacacaggcctgtagagctagtccatccctacgaggctagagtgggatttcatccattcaatttgttatagtaattccatatcaactctctcctaggctcttaacctccaggaaatttccccagggtaaaaggtcctagcctcaccatctgtttatcaggcttcccccatcaattcctctgaacattaaatctttagctccaacagtgggttctaattaaacatttacaatttttatctttggttattctgttgttcctagcttatgcttggtaattccagctaatactattccctgcttatgataaatttattgaagtaattcttcacttttttcaaaaagagggcttattctccattcattgaacctgagatgaccttataacttgcttttgccagtagaatccagaggaggtaacacggtgccatctccaagcctgtggctcgagaggtcgggtaagtttcctcttgcttgtagttgaagctctgcctccacaatgaaacacgactgagccagctgctataggaatatgagagacatattacagagagtcaagatttccagtccttcaaagtaaggccaccctggatcagccagccagcagacacgcaactgacctcacacttatgagcaagctcatccaagatcagcagcactgctcatgtgacccacagacctgtgaatgaaaataaatggttgctatgtgaaaccaccatgttcagagttgcttgttacacagccttaattatagcaatagataattgatatgctgttattaccttatgtgttaaggtttcatttatgtttataaatacaaatacatatatggcataatatctcacatccaatataagtaacttcctaatgtgttatatctacaaacaaaagtttatttgtaatagtggcacaaaacacttccatgaaagaatgagccaccacaaatatgcattgagcaaaatgatagaatctctggtaaattgaggattatctacagaacccttttcttccactctcctgaatatgtcatgtagacattcattaactgacttattcagcagctgcttatgatgcacctgcacacactcatccctgagtgaggcatcgcacagtctgtcataaattctgctgaggaagtttcaaagccagaatctatggctttaccagaggcagaattgctctcagggatgcgaggtgacctgtctcccgagcgtacttgaggatgctaaggcaggccatagagaggaagctccctttctgccacatggcaatagtcagcgatacacttccttacctgagtcctctcagcagacccttaagttagtaaaataaatataaactattatatatccagaagctatcagtattaaatagcagtaagccagcaagcagaagctttatatcacaggggagactgaaattaccttggcaccttaccctacaaggaagctaatatcataaagtgctcaaaatacttttctgaaaaggtagccttcctgtgctcttctgagcagctgaaactcatagtactggctccagttctagatcagtttgaggcagcttgcatctggcaatttgagaggtaatgtgcttccctgaaagtctgttagaaaaaaatgagtgtcatccttgccaaatgatgggacaatttactctcaaaacccagcatgtgttgagtatcacaattctgagacgagaaaatattatttttttctctagttaaaaacatgaagtgtttttgcaaaaactaatgaaatgtttaatgcttgtctgcttacagaaaagaagctctttctaattggaaaacagccagcaaagttgttaattccaaaaaacaagtatgtctctggagttaaaaaattttctgtaaagagccacagtggctttgccatctctaacacactccaagaactagtatccttgccacacattcccgaagagattaatgttatattggagtccttagaaacaagaacataccaatcatatccttcaatcagtctcaacaatgaaaagcctgagaggtaggaatccagaagttacctgacagccaccacctaacctgcctgccccagggaggaagcaccttttatgattctctaagtacaaatatggggtcactgggagttgtcttttaactttgcctttgtcttctctgttaattgtgtcttaatatgtctgtctttgcactttgatttaaacagataaatagaaataggattgaaagggacacagatggtgagagagaagagagagagaaagttatgtttaggttctctcttctcgagaagattctggatgtagtatggagcaaacacactgcgtgatcaacttcatgagccacttcacttttgctttctgtttaaataagtaggcgtggcctaaacctagattctatgtgccagacactttacaaggattatgtaattaaattttcccagcaatcttataagagggttcgaaaattatccctattttaaaatattaggaaatgaaaactcagagatgataagggacatgtctgaggctacagcaggagggcagccaggctggtattcagtcttgtctcatggcaaagcctgagtgctgaccatgctgctggactgccttctccatgtcttctgatgacagaaggcttccaaccttgccgccacacatgccctgcacacacattccccttctacatgagtgtgggccttgctgcatctgtctggacagacgtgatgcccttgactgtgggtttttgctcctgcaagtctcttcatccttcactgcatcaatatctgttagacatcttacttcctgtcgcctgttcacactccacctgtaacacgggagcatgtctagacctctccctagcatgggtcccacaataactggtctattccacctggtaatcaggcagagcataagagtcctataaagcataaagaactgtgacatcctgtttacctcaatagatcaacaattcttgagatcaggatctattcggctcagtgttatgtacacagtaattgctcaagaaattagtctggggagtaggaagaaaaagcaagcttcagccccacagccatctgtctcctttattcttgaatctcatctgacttgtccactgtggtatcctcagagcacagggcagctcttggtacatggtggatgcttgtcaaatgtttgtggaatgaaggaaagaagaaatctaattatccagaaagaatacaaacaaggtacttgagccctgtttttgagtatgcagggtcagggtccccccagtctgggtccagccttggtcctgcctctcgttatggtgagactgacccctcaaaatctctcattcttccaaaagatggtaacaattgtggcatctgcctggcagagacagtcgtgctcaataagtaactcatgggtttcccattgcttcacagcccctttgcagtttgtctgggctatctgaagatttctggccaatagtttgtaaggggaattggaacacttcaattctcatctgatacatttaaggaaagatacaagttctccacactttgcttccaacttcacagacaagagatctaagaacttggagatggagagtgacaggaagggaccagctcaatctctgagtttctgctggagaaggatgaccagggaaactacagcagactgtgatatggtaagaaacacagccaacttgtgtcagattgctgagatttcaagatttgcttattactgcagcataacctgtcctattctgactaatataatctgttctctggaattctgaggattaaagtagataatgaacatcaactctagttcagtgtctgacacatagcagtactcaacacaatgtagtcattgttactatcattattattgtttctactaatatgattattattattaccactcttaatgttgttatcattaccaataactgtggaagccattatttttcatcttgatttatccctctccttgtctctgtctctctcacacaggtacatatgcccatggagataaacaaggttgcaggattttgatgccatttctgacccttagagctacctgcttagtgatagacactcacagaaattaagagctgggaaacagtcaggtattacacataaaatctccggagaacttttttctggaaccagctctgagaccccagctgacagttccctctgcttgttccttcacaaaagcgcagacctggtttgctggttaacaattatacattttaaacagttctgtgctctggctgcatcctcaaatgcctctgaaaaataagcacattttaaaaacacaaaaaagaataaacaacaagacagttcagcaagagaaagaaaaacataagccactgcttcattacagagccatgggcaggcctctcaaaggcagcagcttttataaatgatttcttggaaaagcttttatgtcttcaaagtgtttctgctaaaagaagctaagtgtttatcttgtgtctcaggagaggatatagcataaagtccaggtcactaaaaagaggtattctgagctcttatttatgtgtcaggcctgggaagccagcttcagaagctggctcagtgataaatcatccacatggttgctgcatctctaaacaccgcatctttcattacatcagggagttaataaatattatctattttatcaatgaagggcagtgcctttgactcagataattttattgtagaaaaagacacagtttgttgattttttaaaggttcactttaaaatatttctgagatactgagtcatttgtagggaataaacactaagccacaaaactcaaggcctagacagatattacacagcaatctttttgaacaaattggctttctttgccttttctttttggcccgttgtcttgggtctctagggaactgtgcctatgaataatgtctgtctggatgcaataaagggccagctaagtgggagaaagggtggtgtgagaaaatatgacagcagagattatcatgagttctgatgagatgaagtttaggtttgggattttcctgcttgaagatgagcctggcccttttgggctccaaactccttattgagggcatcttgctatctcctgtatctagcacataattagcctagaatatatctggtgctcaaaaatgaatggttggatgaataaatgaatcaatagggtatagccacttctcactttttatcaaagaatcccctgggaattcacccataaagcatgctattataaagctaattgcatttccccacaaaaacaatgcctttattggaggtttgttctagaccaagagctcaacatctaataaatcagagctatgacaaaactgtcttaagcacaactttgtaatagatgaaaatctctttagttgtgtgcccaagccccatgaaactacactgcttatcttgagtatgcaaagggacccatctgtgactctctacatgttcagctattctgcattacaaatgtaattgatacgtaaaccctgataaaaaattaacacatacagaatcataacattgttgtcctctgagtggatagaaaggtttgagaagtgaatttggatgacaagtatttaaattttacacccaggccgggcattggggctcacgcctgtaatcccagcactttgggaggctgaggcaggcggatcacctgaggtcaggagttcgagaccagcctggccaacatggcgaaaccctgtctgtactaaaaatacaaaaattagctgggcatggtggtgaatgcctgtaatcccagctacttgggaggctgaggcaggatagtctcttgaacccgggaggtggagtttgcagtgagccaagattgcgccactgcactcccacctgggggacaaagcgagattccgcctcaaaacaaaacaaaacaaaacaaaatttacacccatgccacaacacccaagtgccactcatcgtttcttgctgaacaattgtattatttactgactggcctcacattttatgtcttttcttctccaatccatttacacatagtaactgctgtgattgtcgaagaacagtaacctaatcttacactctgcttaaaacgcctcccacttctgttaacaggctcttttcagctcttcaccgtggcctttgaggtcttcctcatgtaaccctgagtgtgtcctgggtctgtaacacttgcatcaccctccaggctctaaaccaaggtgccctttatacattctattcctcaaatacacatttgtctctcgttccttgtgctcctgcttctgcctgtaactctttctttttttgccagtttctagttatctcagatttccatcaaataggagagccttctctgaacctcaggacaagtcaggctgccctattccccacacacccagcactctgagctccacagcaaatgatacttccagggttaagtaatacaggttatgtttacttagttaactccatctctcctccatcactggaagtctcattcttatgtctttctggcttttatcgccatgtgctcagcagccagagcagaatccaaccaagaataggcaacagatgtgtgtgaaataaactaaaaaaaaaaaaaaaagactccatcctgtgcaagccgggtcttcattgggagagcttctcaattggaaatccttaagatgtcaatggttacccaaccccttgtcaggtgtgagccggcctggtttctatgccaattgctgtggctcataagaggcttattccaagattctcaagctcatcctccagttaagccctcttaacatcaggttcttgaaaaaggaggaaaggcctgcctactgagcgcatgggtgtaaaggaaaagaaaaaaaatggcatcactcacacagccctcattttccaccaccaccaccctggccccaggatggaagacttttgcttggggcttcatttgccttgggatgggtgtggcttacagaagattccttctggactatggcttagattctcagatcactataatttcacctctcatgaagaggcagagaaaaaatctcagttgagtctgttttggaatgtctttctaagtggaaaagaatttaagcttcatgaatgaggggccgttagccttaaccaccatcacttatgaaagtgcctttactgtgttcagtactcacacctttagcaaacttccctgcccatatgcacatggatatagcatggatgtgtcccctctaaatttcatgtcaaattgtaatccccattgttggaggtggggtctggtgggaagtggttggatcatggaggtggtttcatcatgaatggtttagcaccattcccttggtgctgttctcttgatagtgagtgagttcttgtgagatctgattgtttaaaagtgtgtggcaccttccctctctctttctcctgctgctgccagctgagaagcctgctgccctttcaccttccatcataattggaagattcctgaggcctcctcagcagcagatgcctgtgttatgcttcctgtacagcctgtagaactgtgagccaattaaacttcttttctttataaattatcccgtctcagatatttctttatagcaaggcaagaatggcctaatacacacactgctgtctataagagctgagacaatttattttcattcccaaagtcaaagggaaatggggcagtaatcactctgacttggtttctcctaatgtccactaaggaggaggaatctgactctggtagctctccattatatcatttttaggaagaagagtaagattaagaaatcaaaacattattctggctgggttgcgttgaatcgagccaagctgtatttgattcatgttatgaaccaaaaaaattctgatgatctgaatgcagattatgtcaatatcactacttctgtctttattgctaaaggggaagaagatttgcaaagcacagcctcaactcaaacagtgacatctgcttaatcttttccttctcaacccctgagtttaaatcttcaccaacatagctttgaaaaaaatgtcacttacagtgataaatcccttaacattgactttagaagaaagcttgtatagctttctctcttaaaataacttttaaaaataacttttctgcaattaaagataaagataagttcaaaaagatgtttatgaagcgaaagtagtgaaaatcatctactctgatctcattttctgtgactcaaaccagaaagtctaaattcaacatgccaagttaatcatttgttgttaggtcatggccttcagtaaaaaccttcaagccaccaagagagactgcagctgtcattcaagaatgagccacctcaagaggggtcataaaggtccacttgacctgtctcaaccagagaacaagtggggccaggaaaatctactctgtaaatctcagaagcctctaaacacagatgtgacagcatcttcgcaggccctgcaggtgaattcttggcctggctttagaaggaagtatgatgtaaatacacttgcaaaagacagcagtgtgagtctgccttgagcagaaagagatccggagggaggcacaggagggaggctgcttgattatggtgtttgtgggtgggctggccacggcacttccctgcctattctgcagttgctctgcttacgtgtcttaaagagtttatttccacaccatctagaggaagatttagaggacaaatgaaatcatgatatgggtgagataaggttatgagtgttgttcactaacaaatctattcaactttacaggcctgaggctgacagttcagctgcaaacactcactgggagtggatggcatgtggggaaaataaagagagatcagattgttactgtgtctgtgtagaaagaagtagacataggagactccattttgttctgtactaagaaaaattcttctgccttgagattctgttaatctatgaccttacccccaaccccgtgctctctgaaacatgtgctgtgtccactcagggttaaatggattaagggctgtgcaagatgtgctttgttaaacagatgcttgaaggcagcatgctccttaagagtcatcaccactccctaatctcaagtacccagggacacaaacactgcagaaggccgcagggacctctgcctaggaaagccaggtattgtctgaggtttctccccatgtgatagcctgaaatatggcctcacgggaagggaaagacctgaccatcccccagcccgacacccgtaaatggtctgtgctgaggaggattagtataagaggagggcatgccttttccgcagttgagacaagaggaaggcatttgtctcctgcctgtccctgggcaatggaatgtctccgtataaaacccaattgtatgttccatctactgagataggggaaaaccgccttagggctggaggtgggacaggcgggcagcaatactgctctgtaaggcattgagatatttatgtgtatgcatatctaaagcacagcacttaattctttaccttgtgtgtgctgcagagacctttgttcacctgtttatctgctgacctcctctccactattatcctatgaccctgacacatccccctctccgagaaacacccaagaatgatcaataaatactaaggaaactcagaggccggcgggatcctccgtatgctgaacgctggtcccctgggtccccttatttctttctctatactttgtctctgtgtctttttcttttccaagtctctcgttccacctaacaagaaacacccacaggtgtggaggggcaacccaccccttcaatggcacccattgctttaccagccatttcctcagcgagtgagcaaatacacacttcaggtgagacagtccttctctcactgtgtcagtgcctgtgtttttggccaaaggtaatggcttcaacctaaagtggctcagatagggggatttaattcctcacatacagaaacccgggatagttgattccagggtggctcaactctcatcagtctgtggctccatcacgtcattatggtcaagagccattttctgtaataagattgtttgagttcgggagccaggcctgcccctgagcttctttctgtctcagtttctccttttgtaaaatagggtaacaatggtatgttaacattgtaaggattaaatgagtaaatttgtgtaaataatgtagaaaagtgctggttctatagtaagtgctctgtgagtagtagctaataatgttaccaataaatgtcagcagcctgtcctactctgatatcctcagctctggcatttcaccagggtggaattcttcttcctgctctgacattccaaccatatagaattcttatgtgatcccttggatgaatacagtgtcatgtgtagatgcggcacaccccacagagaaggaacatccttccttttagttatgaaagcctttcctcaaagttccctagcttctcaaactatctgagatgaagaattagtttgtttttattttcaatccattatgaatcaatatttttgtaaactacaatacaaatcaacaaattaatgaaggaaaatatatacaaatccaagcttcaattatttattattattagatttagcaagcataaaattagtccattaaattactataaacatttttagatgcaaaaatggcaatctaagtccatgaagtggcaccatattttgtgtgactctgtttaagcagttatcactggagtgtacccaagggccaatgctgggtcacatggctaggctaacacaatctctggaagaagaagaagaccatcgtgactgggccagcaaagcctctgctccattggttccattcaacacacacacacacacacacacacaaacacacacagtgcctactgcgggcaaacagctggccaggcagcctgggaggtgtcccatgtggaatgctataaggtggcatgctataagacaataggcacaaaataatattttgacaagggtcccagaaacggctttgtacagcagggagggttcaagctgactcttggctaatggtgtgtgctgcttcaacacagtgacatgtgatgggagaagatactccaggcagcagaaacaatgagctgcagctgaggggaaagaaagttgttcaaggtacagggagtaaaaccaaaaggccgtcatgccaaaatacttattgtagagaaaaaaataatgtggcagaccatcttctcactacttagtgtgggatttggaatgggcaaaatagtggacctccaaagatgtccacaccctaatccctgaacctgtgactatgtcacctgccttgagaaaaggaagtctgcagatgtgatgagcgttctggaccctgaggtggggggtaccctgaattacccaggggggccttgtgtgtggacgtgggaggcagaagcgtgggccagagagaagccatgacaagaagaagaggcaagagcgatggtggcgtgtgaagggtgtgacaccccatgtggatttggagacacaggggacttatgtgcaagaaccaggaggaaatgctgggaggtaaagatgattgccaactgctggccacacggaaacactgccctcagcagtgccacttcaggggctgaattttgccaacacctgaatccgcaagaacatgtcttctcccctagagtttagtgaaaggacacagccctttgaaccttttgattttagcctggtgaggtccataccagacttttgagccacaaaactctaaaataatatatttgcattgtttgtaaggaacaacatttgtagtaatttgttgtcacaacaacatgaaactaatataaaattcatctgtaatttctcttttttaatgtggtgttctggacccgaccttcagaggttctggcttgtcaactggggctagttgttttaacaagctttccaagtgtttttgtctcattccctttcttagagttggagaacacagaggcccaagctctcatggggaatcagcatcagacaagaagctggcctccagctctccagatgcccaagcctgggctttccatcaagaagtgtaaagaagaagctctgtaaagtggagatggctttggagtaagattaaccaggtttaacacctaatcttgttacttattgctgtgtgcccttgaataacttacttagcctttctgggccccagcctcctcatcttatagtcagtgatataaacacctacctctcaggtttaaatgatctcattgtgcaaaccattcacgcagtacctaccacatagtaaatgctaaagctattattagatatgtcctgcattttaccaggcaagaaaataggagccacataacttcaaaatctctccatacattgctgatggctgcatctgtgtcctcccaacacagtgctcctcagtcaggaagaacaagtgaattcatttgttcattaaatatagtacaataatattgactccacccagaaatgttcattctattgtgtgccaggcacagtagatatgagaaagacctgtcactgccttccagaggagctcccagtccaggggaaagtgtttctcaaagtgtgagacattagaacccctgccctgggtaagataagagggaattgtaggtgactcacagacacagtataaagtcacatcactgcagagtgaaaagttactgcatgttcagtcaccttccatgcttctgattacatttaggaaaaggtctgagtttggtgccagcctgtctgtcgcctttctatcactggctgatctcagatatagagcaggtctcatgcctgctttgacaggcgacagagttctgctggaactgaagaatgttgtccagtcaccgctttggcaactgttattggtgtctcatctacagaggagatgctaagcttccttgtaaattttattgatttattttctatttctgattcgggtggttggtacatgggcaggtttgtggcatgggtgtattttgtgatgttgaggttcgggtttctaatggtaccattgcccaggtagtgaatacagtacctcgtaggcagtttttcagcccttacccttcctccttcctccccacgttcagagttcctagtatctattgtttccttctttgtgtcccaacttttacctcccaacttatgaatgagaacatgtggcattcgcttttctattcctgtgttaatttactcaggataatggcctccagctgtttctgtgttgctggaaaaaaaaaaaaaaaacacccataagttcattcttttctatggctgtgtagtactccatagtacatatgtaccacattttcttttatgatagaaagcatttatttatttatttatttatttatttatttatttatttatttattttactttaagttctgggatacatgtgctgaatctgcaggtttgttacataggtataaatgtgccatggtggtttgctgcacctatcaacccatcgtctaggttttaagccctgcatgcattagggatttgtcctaatgctctccatctccttgccccccacccctcaataggcccctgtatgtgatgtcccctccctgtgtccatgtgttctcattgtttaactctcacttatgagtgagaacatgtggtgtttgattttctgttcctgtgttagcttgctgagaatgatggtttccagcttcatccatgtccctgcaaaggacatgaactcattcttttttatggctgcataatattccatggtgtatatgtgccacattttcttcatccagtctatcattgatggacatttgggttggttccaagtctttgctattttaaatagagctgcaataatcatacgtgtatgtaccacattttctctatcctattcaccattgttgagcacctgggctgattctatgtctttgctattgtgaatagtgtccttgcaaatgttaaaggtgaccgaacttaaggaaaatcattaagacagtaatagtatgaataaaacacagacacaggaaaaatcatgaaagtaagacacacaagatgtttggacaaccctgtaatagtaaataaagacatgtaaacatttgcaaggttgagcaatgagagctaagtatatgctaggcaaagggagtgcagagatgggatgatcaaatttggctgagtagggaaacatcttgcaaagaaaggagatgcttgagtttcaataatacatacagatgagtgtttcagggagtggtgagtagggagggaggaactcctgtcagaaagaacagtgtgttcagaggcacagctgtgccacccagcactatgttcaggaaactgctgtgaactaaatgcttctcatagaagagttctactttgtgcacacagtcaccacacttgctgggaaaatcctatgtgtgtgtttgtgccacttggaatgcaacaattagtgtttaaaacctcatagaacatatgagtgtctttctgctctatggtttggtgagcaaaacttcacatcaagcatccattcctccttcgactggaaaactggatgtttttggcctcagaactttgcattagctttcttcattgtcttaaacctatttttaaactgaaatacacccataaactggccgagaaaagacaaagctgtatttgttaccgaatagcatttcggaaggaaaacttgtcagagtccttcatgatcactcacacagttttgttctttccaaagcaggggcgtaagaagccaggcccaggtgcatccttaaatgttaccctccactgcctaatgccccacatgccagcaggcgggattctccactacaacctgtcagaggatgccttgctcatctaaatagaatgccaggctccttcgtaattaagagcagcctctatatgtattgtcccactgaagaatattaaggacaaaatagttagctgtctgttgaaatccattatcagaatgttaactgaaaacattgcagttaaaaacttggatgatggataacaagagagaaagaagaaaagaaaaaacagaaggaggcttatgtatttgaacttcagagcaagccctaaagaccccaaggctatgatgagatcatttcctccagagatgttgtcccctctgcttggagctggcctctgttggttgagttaatggctttttgttttggtttggttttttttgttttgttttgttttgtttttgtttgtgtgtgtgtgtgtgtgtgtatgttttctttttgagacagggtcttgctttgtcacccaggctagagtgcagtagcgtgataatggctcactgcaggctcagcctcccaggctcaagcaatcctcccacttcaggccctcaaagtagctgggtctacaagcatgtgccattttttaagtttttgtagaaatggtgtctcactatgttgccctggccggtcttgaactcctggcctcaagcaatccttctgccttggcttaatcccaaagtgctgggattccaggcatgaaccaccacacccagccaggcttataagaaggtgaagattctacactgtgcccagatttaacaggaaaacccaatagttataagctcaagctctgaccacagaaaacctggagtctcaagcccaggccccagacaagcaacatcactcactgggtctcagtattttgtgtttaaagtgaggatgacaagcaatgagaaaatgcacacacaggatccagcacagggcccggcacagagcacctgctcgggagtggccgctgctgccctcagggacacttcagctgaaagaggtctaggagtgtgagtgggactctgccgaagctgcacagctggctccatgaaggctctgtgcagcggcaggaggcagaggaagacatgctttcactgggctttggcctcactgaagtgacaccaaaattaattaattaattaattaaaataaaacaaataaacccctaagttctttaagtacaagaggaagagttcagcaccctggtcctgatcagtcctggaagatgaggcttctgagggcgaggcggcaccagggcttccccttccaatgactcttccaaaccactcaactcactgaagactgagtcattgctgccattgtattgttgttgttgtgtcatcgttgttgttgcaaagctctgcactttactatcagaaaggactaatggaccaattagggagggttatgttgtaacattaccctcaatacacaaccacgaggtgccaaacatgtctaagagacacagggaggatggggtgcactaggctgcctctgttcccaaattctagccttgtggtgaagacagatgtgcaaacagccaactctagtgccagacagagtgtgatgagctctgtaactcaggactgcagagcagggagcaattcactgtttctgaaggaggaggcagcaatccagccaatccttagaaggtaagtaggatttcaataagtagaaaggggaggaaggcatgccacggtgaaagaacagatgggatgaaagcccagaaatggctgtatgggaagaagggaccacagccatcctgtgaattattaagagttatttttttaaaaagcatttggattccagattgcaaaggatcacagtaacagatgataggggctgaggagacagccactggcatatcggcatacgggtcacatgttcttctacctatcctgaagtcccttggtacaaatatagactcctgttcaagttgtctgttcacctgagtgccccccaggaggctgcaggctcaagagctgagactgtgactggttattcttcatctgggcacagaacagacaattcaaatagagctgcaaggcctacaagagtacatcattcactcccaggaaaacgaaagaagcctcactttcctcctccagaatcattcttggtgaacattgttctgctttagcattgacttcaaacacctgtaatcaccatgactaccaatgcttttctctccaagcggatcaaatctcactactctggtttggactattgcaggaacctcatgcttaccctgagcccccacgccccaaccctgcaaccacccctatgaaagcagagcgtgagacagctgcctacaggcatccataaaaaatggactatgatcccagggaataggaatggggcactaggaagggcaaggcagaaaaggatggtcagccaatatggtgccaccaatatgggcaactggttcagaactctgccatgatcctctgaggagccatttaggatacactgcaaatcattccagccagaggacaggaggagtattcatccattgtctccagcctcccgttggtcaagtgtggcccccatggggctgcaaattccctcacaatttcaggtcacatatgcaagctttcaggatggctctcacagacacttcacagtatcagagaagcactagaagaaggagaaaaagatctacatggcgcaggcaaaccagagtgctggctgtttacacctgcaagaggacaattgctgtagcaacagacggaataaaaggtagatggaaaaggcataaggtagagaagcctggcatagtgtccagtgtgcctgttaacttgtctcttccacctcagggtgagtctaacctggtgactacagcatgcgaggtccctccatagtgaggcctccactgggcccagcgtcttctactcctgtgactcccagccatgttccagccacaggtgacttccccagagtgaccgctgtgctctggtaaaagtgactctttgtgccctgagtgttctctgctctccctggaaaatctcctatgcagattttgatttatttcaaatagttcctcgaccgtgaggctcctctggtgctcacatagacacaccggcacctcttctattcttcagcaacactttggaggttgctctcaatcaaacagaaatagaaatttagttttattcatattttcattctcaatttttaattaattattatattgacatatatttcacatatcataaaattcatacttttgaagtgtacaattcagtggggttttctgtttgtttgtttgtttgtttttgagacaaggtctcactctgtcacccaggctggagtaaagctgtacagtctccgttcactgcaaccttcgtttccagaactgaagcgatcctccaacatcagcctcctgagtagctgggactaccaacgcacaccaccatgacctgctaattttttgtatgttttgtagagatggggtttcgccatgttgcccaggctgttctcaaactcctgagctcaaagtgatatgctcgcctcggtctcccaaagtgccgggactataggcatgagccaccgcacctggccacaattcagtgtattctaacatagtcacaaagttgtgcaaccaccacaactatttaattttacaagtttttcatcaccccagttagaaactttctagccattagcattccttcagccgttttttcctttccctaccccctgagaaacactaatctactttctgtatctatggatttgccttttatgaatgcaaaaggatgaataaaaacttgggaccccaattcactctgtcaaaagaaaaaaaaaaaaaacatgaagccgaaagctgagtcatgcaagaagctgcctctccttttgttcctaagtggagagctacagatgaaaggctacaaatctcaacaggtagcgactctgtgttcaccttatcttgtgtaaagagacgatttactgagtgtgagctgaatatctaattgacaattccccaactgcttcttttcccttgtaacatatggattgagtaatgtgaccatgccctctttctttctcctccagacacttttcccattaaatagtaaatccctcaaagtcatcttcggagaaaggcacagacctgtctctcgggtgtgcatccttaaccttagtaaaataaacttctgaattgattgagacctgcctcaggtactttttggtttacacagacatttctaacataccgtactatacaatgtgtgccatttgggtctgctggctttcacttggcatattttcaagatttatccatgtggtagcatgtatcagtacttcgtcttttttacttccatataatatttcattgtatgaatatgctacattctctctattgttcatcagttggatcttcgttttgttttcacttttcagctattgtgaatagtgctgctgtgtcttgagtgttaagagggggacatgtcaagggtttttctccagaaattcttaagcaaggaagaggagcacacaggagacacccttggcctatccacccatcctactcttctcgcctgggcttgcctttgttcctttctcctttgctctctgttttggtaaatgcttgtttactgctgagttagttgtctatgttgacttagttttaagtgcatagtaggtaaagctatttggcagttctgtaatgttactcacaatatagttaaccaaattttttttcttagtgtcatatttggtcactagcgactctcttaatggtctaacaaataaaagctccctgactttatttctaattcagggtaaatgaagaataaactaatatttgaatatgattatgaaaaagtccctttgggattgctacagtaaatatttattaaattgatgtttttatgagttattctcagctttaatagcactagggacacactagttgttggataaatactgattctctagcactagctgggtgtcctataatgcaattcaattctgacactctctgcatggagtcagcatctcatctcacacattaagagattttctcccacaggacaaaccccacttgaggcccaagactcaggctacctgcacttctgacggagcagctataaatggaggggctccatgacccccttctcaggtagaattatttgatggaagggctcacagaactcaggaaaacatttccaactcagaaacagctcaacggaagagacacttagggcagggtgtggagggtggagacacagcttccatatcctctctgggcacaccaccctcccagcactttggcatgttcaccaatctggaagctcatcctttggaggtttttagggaattgtattatgtaggcatgattgattatgtcattggccatcagtaatcgaactctaactgcagcccttctctcctcccagtagctcagcaggcagagctgaatgttcagtcaagcctaatcaaagcttagtctttctggggaccagctgctatccagacactcccaggaaatgactctcaaagagccacctcactagcactaatgcaggtatggttgaaaggggtttgttatgaataacaaaagttactcctattattcagtaaattctaagggttttaggagttctatgtcagaaagcagaaacaaagaatatatatatatatatatatatgctcatagagtaaatggataaaaggaggggaaaaagaaatagtgaaaagatggaagaaaggaaagagagagagaaggaaggagagagggagagaaggaaggagagagggagggagaaatggagagagagaggaagaaaggagagaaggaagagagagaaggaaaggagaaaaggaagagagagaggaagaaagagagaggaaggagagaaggaagagagagaggaagaaagagagagagaaggaaggagagagggagagaaggaaggggagagggagggagaacgggagagagagaaaaaaggagagaaggagagaagaaaggagagagagagaagaaagggagagggagagaaggaaggagagagggagagaagaaagggagggaaggaaagaagggggaaagagggaaagagaggaaggaagaggaggaaaaaagaggaagggagagaaggcaggagggagggaaggggaaaggagaggaaggaaggaaggaaagaaggaaggaagggagggaggggaaagaggggagggagggaggggaggaagggaagggaaggaaaaaaagaataagaactctaccactaatgctacctctgttgttggtggggctatattaaatctcccagattaaaaatgtttggccaacactggcttaaaagcttcccctaaaaataccatttcatcaactgagtgaccactgaggctcccaaataaacttgtacaaaaacagtccccattgattatttcagcccacatctcaaccatggctgcccttgggctcaaagctcacatagcaagaagggacttgcggttgacatgctggcaactcagcagctagagcagtttggaattggatgagcattggctgctcccaccctctcttttctctgaaatgcaaataagccctaggtaaggacatggtgagcaaagctgggggtaatccagcttattgtagggggcaccagcaggtctccttccatcatgcatcttaatctagataaggaagtgatgctggtttaggagaatgagttgcttctttgttggctgtggactcgcttctgaatatctgcaaaattgtcaggagaataaacaaatttctgcttgcctgtgtatatgacaagttccaacttcttcaccaattaaagtccgagccacctctaccccaccaccattcatcatttccacagtgggaaaattacacagtttgcacttttatatgtggtagcaattaaacatcttctggaagccaaaattcatagcaatgcagaatgatgatatagaaaacccccgtgcaaatgcctaatgtcattttttctccaaagggctataggtgttgcaaaaatccaggagagaggaaagtcttctagttataaagcagttgcccagtcgagttattcttaaactgcttttgtgccaagatatctcttgatggaaaatgtctccatgcttaatgtggaccatggacaacaacatgggcaagacagagtagagttatgtgtaatgtgtgacatagctgcagcctttctcccctattcctggaagtgaatcagaatacataaggatgaaagccatgttgctctagggaacaacttaaatctgttttcttttttttatttttatttttttagatggagtctcactctgtagcccaggctggagtgtagtggcacaatcatggctcaccgcaacctctgcctgctaggttcaaatgattttcctgcctcagcctctcaagtagctaagatcacaggaatgcaccaccacgcccagctattgtgtgtgtgtgtgtgtgtgtgtgtgtatgtgtgtgtttttagtagagacggggttttgtcatgttggccaggctggtcttgaactcctgacctcaggtgatctgcccacctcagcctcccagagtgccaggattacaggcatgagccaccatgcatgaccttaaatctgctttcatttacacaagaacaaaaaatcatttacaaacactactactttattattaataaatttcctggaggaatcctcactgcagtcctcacaattgttcacaatagcacctccttatcaagatgcaaaattgagaattgctagtctagaaaagtaaaccagttatcagctaaggtctccctgacctctaaaatttagaaaggataatctttataccgtgccctggggaaggccaatcctggcctcacattcccacaaacgcatggggaacttccatcttgtggccacctaagtcttcaacttcctgcttcctctctcctgcatcttgaggcagtttctgtagcttcacacacacatacacatacacgagagagagagagagagagatggcatctgtgtgtagcatattagcagagcaagtaagtggttaagagcaagttctagaatcagactgcatgggcttgaaggttgattctaccgtgttataactttgtgatcttgggtaggtcatattatctttccaagcctccattgcctcatagttaaaatggagataatagtaatactcaactcctatgctgctggaaggattaaatgagataatgtatgtaaagcattttgtacagtatttggcacttagtaagagctcagttaataacagctttatcaccgtcatcattaggactggaggtttgagaagacaaaggggttccactgcagtgaaacacacaaagcaaactctaaaactggtagttaaacactcctggtcttaatcacctggccatgtgctcagccatccttcctctctcatcctctttcttcttcccttttctactcttccccaatccatcctttgctcatttctgatgcctgccagtttgttttctgatttgaagccttgcttctcactaacaaatgtccccatggtcctaccttctcccgccagcaatttatcaaggtatttggttagacaaaagcaatagtctttcagttcctatgataatattttttgtactatactctagaagttaaaaccctaagagatgccagctccatgcaatttcctgccgctgcaaacaaactcactacggtttttaagaaaacaggtttttattatttggttgtggtttactattggcagtgatgtcaactgcaggagaggggagatgagtgtgatgtgtaagacaccacccactcattgcagaatgtggcccaatccccactccatcttgggcttcctttcactcttgcccacctgctgttttgcccatgatataatacccattctattccctggaagagataagaaacagactacccttatgtccttgaattttcctgacgtgcctggacagaggctcgggtcatgacagagagcccatcaacagacaggccacgctctgcccaacagagccctctgccacctgctgccgctgctgcttatggttgggacatggacagaagcatcccctggtgtttttaaaatatggccttggtgctgatctaccttttaggcagctgtgctttttctaccccaatggttgattgtgtcctggctttatttacttaaagccagatctcagctcttagttacttgccagtgaggacagaatttgccaagtgggtgagaaatgtgaagtttggagatccagaaatcaagtcttttggtcaaaaatctgtgcagataaatcagaatttaggaaaacagtaaaaaggggattgaccctaagaccctgggcaacccagcatggagaaaccttgcaccatcttagcttcttagttcaccttcttccccacatccaatcagtttgcaagctccatccaaccttcacacatctcctagatccttcctctcttctccctcaactgttctcccttccatcttggcgctgcagcagacacattttatgtatccgttcagacccttgccccctccctggtcctcggggctgcagcctgacaatgccctgcctcatgcctagaggtttccctgctgataaggcaggagatgcacagactctctatgtgcctgtccctgtgcagtctggatgtatgaggagttgctgctccatgggaccaattttcgtcaaggaaaaatcctccagaacataaactccttttctattttcccctcggatgcactgtcctggaagcagttagttatgtgcctcatgggagagaatgccctgatactaagctgtgtgcttgacacagggcagcagcagctcaatggcacatgcactcactgactctcctcccactgccgcaccctaccctcacatcattcattccttcaacaaacctggattaaatgtcagatgttgtcctgtgtcctggtacaatgcttgtcagtaatatagaacacctgtctctttcagagaaacccaggctaaggcacacgtgcatgcatcacctcacatctggaggactgcagaggtttcccaatcagttttcctaactctagcctctttccctgcttgcttttcctatgataaatattttctccttcccatctttattcctagttattcaaatgttcccatgtatatgcatttcaaggcccagtctggtggacatcttcccaatacttctttattttggaaattacccctcactccattcccactcatgggtatgggtacagtgacactaggagctaccacattcttccatgagccatctccatcatccccctccaccagagttccttggtgctgaaacagaccaatcagagttcttggctgagatattttacaagagaatttaataaaagattgattccctctttagtcacaaactaaaatgtgtgagcctccacagctatatttctcgctgtgtggggaggggatccaccgtgaggtagaatgatgcccacacaaaaagaagcagaggagagagatggagagagtcccagaagcattcaagtccctgataacagaggcccagccatctctctgtattttctatgcctcaaatgcttgaccttttccgcaattatatgagataccccagtattcctccaatactttcttactttttcctatgcaagttcaagttcaatgttagcttctctcacataatttattcattcaacaaacttctattaaatgtcaggcactgttctacatgttaaagtgtcatggggagcaaatcagataaagtcacttccttaatatcgtatgcaattttactgaggggaaacagctaataaaaaagaaaataatttagagcagtgataagcattagagaaaaaaatcaagtggggaatgaaggaagggatgttgtatttagcctcgtcgagggaggccttgctaagccagggataaatcacagataataaaaaaaagccagccatgcaaaggtaaaattggatgtaagagctataggaagggaaccgacttggagtgttcaggggcaggatggaagccagcacagccgggcacagggaggtgaggctagaaactcaggcagaggccaaagcaggtggctccttggaagacagagtggggagctgggtgctattcagcccagcatacccagaaaccttcccaatgccacctcccttttcatttgaacctgtcagcctgagtggaaagttcaccatagggagagctaagggaggctggagtccctctcggagatgacaaatttcgaaccacttactccagagccatgtcaggccctggggttttgctcccagtctcaccatggtaagatgggaggacttttcatattttatggtcttctttcctcttttaccgatacatgagaatttgatttttaaaactcctccagctacataatggccccaaaactgattgtaacaagcagaaacattcatgcccagtggctcttgcctggttccccatgtgtacccatttgaaaatgaatggacattatggaaacttgtaggcagacaggcggatgggagagcaggcagcaagcgctcaggtggagggcacgcatctgggctccaggccatctctgtctctcagtggccaagaggtcctgccttactcagaccagacagtaaagttattacaaacattgaagtctgtgtgccctttctggcaaagcttcagtgctagaatgatgatttcagcttctgtttacactgtattcagccatgtgctgtatgcactgcgtgcattatcctacatgatcccttggacaaccctacaggataggtgctcctgtgtccgtttcacagactaggacactaaggttcccataagtcctggcacctgcatgctcaccgaggctgtctctgccgctcatctcctgggcccatttcacagaggaagactctaaagctcctgtaagtcctggcacccgcctgctcgccaaggtaatctcctgctgctcatctcctgtgctcctgccataaaggtctgttctcttttcctcaaacactcaaagtctgttcctgcctcagggcctttgcactcgcttctgtctctgcctggatttcttcaccaggccagcttcttcattaagatttcagtccaagtgttcctgctcagaaaaaactttcccaggcatctgggtgaagtatatttcacctacctcagctgctctcttttccatttcctttttttgttttataaatagcctatatcactacctagtacttcctttttttttaaatttgtttgccttttaaattgactgaccatactactggtagaatatgagttttacgaaaagcagcaccaggtctgtctgctcagcagcgtgccccaggcatcttgcatggtgccaggcctttactggtgcatgatcctcatctgttgagcaatccataaatgagtgaatgaatgagaatttgtccagagtcacacagctgccagcacatgaagccctaaggctttgtggaacacggatttgtgacaaaagttgacagcaatttcaagctataattctgcatctcaatacctgattcatgcatccatttactcatctatgtattcagtggacatttactgcggttcccaccagatgcctgcactgtcctaggtgcctgggggtcatgggaaatgagacaaaatgtctgctttctgagaactggcactgtagggggatcagcactctgtgaaggtgtcatcatctaacttaacatcaggcagtgataacccctttgtagacagagtgagaggagttgcctatttgtgcactgaggccagagaaggcctgtccagaaagaaagcaaaagccatataagtatccagaagagaattatagaagatagaccataaagtgattttcttggagtcagttttggaatgtcaaagaataaaaaggacagtgtgggtggaactgaatcagaaagtgagaggggcaggagctgatgtcatcaaggcaggcaggagcctcgccgttcaggcagaggcgccgtgaggacaccgcagtctctctgaggacagacctacggagaggattctcagtggggacagacgtgattggattcacatgttagagagactactctggcttctatctggagaagaagttgaggaagagcaccatggaagctggtgtctcatctcctgagggcgagccctgaatcctgctgagactgcagccactgagctgaaggacagagggccctggggcacatggccatcctaactgctcaactttcttaggaagggaagcaagtcgcagaggaggagtttgtgcaagggcctacataaaattggggtgtgttttgttattaatataatccgcaccagctctcggtggtgttcggatttgttgctttagtgaacactaaactatgctccctccgagggaaacgtcattggaactcccgtcccaagtgtacgctgctgccccatgtcaccttcaccctcagtcctctctgccttcctaacagactgaaactccaggccacaattcagacagctttttatttattctttcaattatctatttacttttccttcttacatttactttttccaagattgcctgtggattctgagaacatcaggttctgaaatgtggccttcgtaactgttctcagtcctgattccaagcagagcctggcttggataaagatccctgtgtctcagcactgccaagcggggatgggtaagcagaaattcccaaatcgctcctatcagtggctgttttaaatctgcaaatgtccccaggcttgcagccagggagaccagcactatggctaagggcttatgagctccctcaggaatctgcctacctgccctttccttagtcctctgacaaatgtcctcagagccccacactttgaccaggatccccactgttcctgttaacaccctatgggggtggggtcacagaggtgctcatggaggggccgccagagctcgccaaggtcttcagcaccctcctgtctaactggccacttggtttagccaatccttcagttcaaataactagaataaccttttttgtcttttactaataatatgttttgctgactgcatccactgtctgttaggcagcaaagagtctttaaactgtggaaagacgggacacgtgacgtgcctctctctttgtcccttgggcagaaatgtgctgagagaacacttccacctacctcacaatgttgaatcctcaccactacctgtgagtcttttgttccttttgtgtgtgtgtgtgtgtgtgtgtgtgtgtgcgtgtgtgtgtgtgtgtgacagagtcttactctgctgcccaggctggagtgcagtggcaccatcttggctcactgcaacctctacctcccaagttcaagcagttctcctgcctcagcctcccgagtagctgggattacaggtgcccagcaccatgcctggctaatttttgtatttttagcagagatggggtttcatcatgttggtcagactggtctccaactcctgacctcaggtgatccgcccacctcaggctcccaaagtgctgggattacaggcgtgagccaccgtgcccagcctctgttcttattttaaaggcaaaaaactgaggctcagcaaggaggacagtctgttcagcaccacagagctagtcaacgttgtgatctgtgctagtttcctggggctgccttaataaagctccacaaactgattggcttaaaacaacagaagctcattgccttgcttttctgcatgctaaaagcccaaattcaacacgttaacagagctgtgctcctttcccaacctccaggaggattcctgtccttgcctcttctcacctctagtagctcagctgctctttggcttgtgatagttgtggcagtatcgcgccaaactctgcctccattttctctcagtgcctctgtctgaattgtctttttcttataaaaacaccagttctattggattaaggatccattctattccagaatgacctcatcttagctactcccatctgcaacaaccccagtcccagataatgtcacattctgaggtactggtagttagaattccaacagaccttttttggaaaacaaaattcaatctataacatgatcctagctacaactttggtgtcttttctccaatttcaaggcaaattcatctgctatggggaggaaatcttccactacaccagagtggccatcgagttagaaacagaagctataccaggcagtttcgtccttgtggctggcaggatgacacatgaccatttgcctgggaaagtccaggtttatgcctgtgacccagagtaaatactaatagtgccctttccatctcaaagttgatgaattttggacaattatttgacatcccacttagagtagacattttctggagcatttagtaagtatcaaacactgtgctaagacagtcacaagcattgtcttagacgataaccttataacataattgtccccacctcacaggtggaggaacccaggaactgaacagccacagccctgcagctggcaagaggcagagccagggtcttagctcaggtgggtttgattcccaaccctgtgaacttcatcacggtatcctagtgccccctgggtgcagatggagcgcagattcctattttattattcagaaacttcaacgagctgagctaagcctcttctcagccttcccttccccaagctgatattttacaaatcgcaaccataatcaaacaattgttcttttgaatgcattgcgctgattgttctgaaaggaaagtcataggctgatgtgttcctggatggagcagaatctatcatttttctactcaggaagaggctggctctgaaaacacagtggaacaaattcatcacccgggaatggcgctaactgcgtttccacagaggccctgcagctctggtggctgacactgggggcaggtctggatctctgcagtgaaattgtcccttcaggttgggtgccactttgatatttaagaaggaagattccacttcacacaagtgaccccttttgctaagaataactccattagctgctcttgaagcattgtggatcagcgattgtttagtagctgcgtggttttggtgactgttttgagttatacatgttgtgtcatctgatgaagaagattctcattttagtgaaagtttgaggagtgagtgccatgcctgcctctgtgagccctgtcctgaatgctagcaggcatcaccttggattgaaagctggaaagttaactctgatgcaggaatacaacaaaaaacattcagtgatgcaccttgtttaacaaaaccaaagattttgtccatcccgtcataaagacagcttctggtaaatttggagaaagagagggatatttcttatctctccctgagaaagtgcaggctacgtcttgcacctgtgccgccaccttctttaatgggccgagtggtgcaccctaaaatttgttgaagccctaacccctaatgtgactgtacttagagacagattttacagaagtaattaaggttaaattaaggtcataaaagtggaatcctaatgaccttagaaagcggatccctttgtctgcacgaacacacagtaaaaaggccgtgtgaggactctgaggaggccgctgcctgccatccagagtgagagcccttacaagactctaaccctgctggcaccaagatctgagacttccagtcttcagaattgtgagaaaataaatttctgtcacgtaagcctcccagcctgtggtattctgttatgacagtctgagctgactaacacagccttgatctccatagcccccaccctccacactgacatgcttctctcaccctgaggactgatccttttccttcattccccaaaagcaccacactttcataaaagcttggaagcatgctgggtgactgcagcacagagcttataacaaaatcatgaatgtgattgcagacataagtcttcctagagataaacctaattgacaacttccccctgtaggaaattttctacggcccttatatcagcatgctgctacacttttcccagcacccttcttacacctgtcattttccctgcacttcaaatgagaaggaaattccttctatagagtctggggccctgtgcccatgtaggggattttctcaagaagacctcgataatacagggagaacaagctattgaagaaaagcccaaaattcaagtaagggtgagaactgcaacctccctaccaaactggtgaggtcaagctagcacccctgatggcagacaccggggagctacaaggaaggaatgtgggcacaaagtaaaaactgtgctaaattgccaacgtttccagttttccagctgtggccatggtagccaaagccatcgtagcccagccaaatttactgagcatttctggcttctgtctccacaaagccagatgaaggagtaaaagggaagacttggaagcctaatatctctaagacactataaagacaagaaatggataacagtggtcaccaggaaggaggcaaaactggagatctggagaacagaaatggaataaagacttcatttttcactctagattctcaattttcacttagttttcagggctttttttttctaatcatagattagcaattaaacacttttaataaaatgattttaacagcactaaattacataagaaaaaaattcacagtgctatagaaaataaaccaatggccaatgaacatagaaaatgctatcaacatgactcatcattaaataaatgcaaattaaaggtagtaacaataacatccaaattactcctcagtgatttctcaaagaacttagaatggccgtttgaaccagcaatcccattgctggtcatatatccaaaagaaaagaagctgttgtaccaaaaagacacatgctcgtgtgttcatcacagcactattcacaatagcaaagacatggaatcaacctaagctcacatcagtggtaagctggataataattccatgtacaccatggaatactgggcagccataaaacagaattaaatcatgttctgtgcagcaacacggatgcagccagaggccattatcctaagcaaattaacgagtaaacagaaaaccaaataccacacgttctcacttataagtgagagctaaacactgggtactcacggacataaaaatgacaatagaaattggggaatacaaggttgggggaaagggttgagaaactccctattgggcactgtgctcgctacctgggtgatgggatccatcataccccaaaccttagcatcacgcagtatacctatgtaacaaatctgcacatgtacccgctgaatctaaaataaaggctgaaattatttttaaaaatattcctcactggccttataagtaggctatattctcagcttgccagaaagactattttaagagttgctttttaaaaattttcccaagagttaatctgtcaatctaaaacttcttttccacttgtaatttcatagcaaaaccaatacatatatatttcctgaaggtggggagaaaaggagaatgtgaattttctcttttaaaaagcaagtgtcaggggttattacatttcagaggttatcacacaaatccacaggctttgggtcaggctataactctgggaaacaggagttctctttttcactctatccactttaaaatataacttagaaaagtaatttatgtccttcttaaaattccactcatgtttactgcatgggactgtgagtagaagaggcctccaggcacctcacacaccacaacaagcaggaccatattactttggtgacagttcttatatatgaactattgcttagagcaatggggatgcaagaaggccgcaaagacttcaagtggaatgcatgcatctgtctatcaactttcaggccaagggggagtaaacaagagaaatagatccattaataagacaaaaatgtcaagaatagacagacatcaacagaaattacagtctctgaagaagcagtagcaatagaactgctcagatgacaagaaaaggatagtttctgtggataacactgttaaaagcatttccacatttatttccttctgtttgcaaccttaagatgtgcaaaatgttaaacagaatcaatgcctggagaataaagaacacttggaaaaggaactcagagagccgtatcttccaagctgggaggcctggcttccccacttgttcctcccagtaccgtggaggcagcgtgggaaatgctcatctgctgttattctgggcaagaggggagtgaggtcccttggaagcaaacacgagcttcttagttatctttctaccatcatcctttcagtaccagcacaatttttcctcctcttcttttcagatttgctggtatgacagtcagatttctcccatggatgttggccagaaaattccctggtctctcaatgccaggaaaagatgctgacctcacttctctcccaaacggagagcttggccaaagaggttaaatcacaacagccccaaatgattttttaagtgaaaatagattgtctaattttcccacccaaaagccttgcctgggtcacccctagagctaagcttatggggataattcatctgtaacatttttaattacatcgatcctgtcactaaaattgtgctaacattttttattacatggaaaaatacttgtcaacaatattagtagtgaaaaaacataaaaattatataaaatactctctcaactttttcacttatttttgcataagaactgtccgatctttttctgttctctgcatcactctatatatttctatttttcccaaataaatagaagttttctcataaaacgtgtaatttttaacaatctaatggaatttttagtataaaaagaaagaaatacattttaaagctgaatttaaacatgcagagaaaattgttgggaagcaaatttctaattagaataaacaaccactgcactaaaaacaaaattcctcaattgaactttctcttgtccctaaaattacatccttcagcatgaactaggggactaggcagaatcagaagcctggaaaaccaccactcctctcgccactcactctctctgtggccttgggtaataacctaatcaaatatcaatttcactgataagaatctgccaactgttctaataaaaaaaacaagcaaaacataggtgtggggggcttaaatttaattattgattctctgcacatgtagacctacacttccattaactttcgcttggacacctgaaagaaaaagcagaaccaaagtagtttcaaaaaggactctccccaaggcactttttaccagcccaccataaattccaccattaaagacttctgtctctgtgttgattatttctcctcttgtaaaagacgcacacataatgttgtggtaagtcaacggttttcttaatgggcctcatgcagtcttgtggggcaaggttgggggtaaactcaaagtaaaaaggatggaattgagtgattagacctcaaaggatggagctccttggagtgtaggaagggagatgggctatgtagagggtgctgatgcaaaacaggagatgggggatttggaaccaatcatcagagagaacaaaataataattttggataaactgtgaccttactattagagttgcctggtgatcagccagatttggtaaaataatttatatcagccaagatccccaaaagatatagagagtccactcagttggaattgaagaaatttaacagaggctacttacaaaggtgggggtgccagacaaggtccagtcagagaaagaaactacatgagtaactgaagcaggggaagctgatacaaagaattgttaactagaaagagtgactttcttcacaaagaagtaaaataagtctcaagggttctgaaagaaaatgcagaaagcagctgccacctgttgcctgagagaaagtgaacaaagaggcagcttaaagagggcctgtgatatagactgaattgtgtccctcaaaattcatatattgaagcttcaacccccaatgtgactgtatttgaagacaaggccattatggaggtaattaaggtaaattaagggcatgagagtggggccctgatctgatgggattagtgtccttgtaagaagatgcactggcactcatcctcccaccatgcacctgcactgagaaaaggccatgtgagcacagagagaaggcagccgtctgtgaccccaagggagagccctcactggatactcacactgcaggcattgagagcttggatttccagtttctagaaacatgagaaaataaatttcttttgttgaagccctgcagtctatgtcattttgtcagagcagccttagcagaataatccagcctctcgaagctgagattcagatatttttgaagagatcctggccaccaccacatgcagcctgcagcagagggagcgagctgaagctggtcataggacagcccaccaggtgacagaaaaacttttcagaaagtgctggtccaaactaagagcccagtggcttgtagaaaaacttgctagaggctgtgggtgggccaaagctggtccctagaagactgctgaagagaatgtcttcatgcctcccacattcccattcactgtgtcaaaaatatgcatggccatgaagtgttctttaatgctctctattaataaagtttcatactgaatgagctggcaaaggagaattgtttgcacgttttatgttcagtgctacagaactgcacgtttgggctgagaggcaataaattgataactgacagagggaaaaacaaggcacattgaggaaccgtgagactagcaacagttgtaagacctataactcaggtttcaagccaaggtagaagaaacaatgttactcaagtttggtaattaatagagccacagagctgcagtcataaagagataaagccctgacagatattatagtgtgcaaaatccctctctccctccactctctaatctgttcctgaattatcctgtctaaattcacctggaagcaagagggaaatggagctaggtgatgctacctataagcattttagcttgggctccccaaccatcagatcttgagacgagtctgtgagtacaaataattcaattgggagaagatgaagggaaggaacagaatagtgagatatagaagggaaggaagcaaataaaaggtacaatattaagcaaggaaaaattataagcaaataaaatttccaagccaactctgggagacagtgtagaccattgccccaagagggtttagttattatttattcatatttatttatttttgagatagggtatcactttgtcacccagcctggagtgaaatggtgtgatcaaagcttactgaaacctcaaactcctgggttctaggaattcttccacctcagctttctaaataactataactacaggtatgcaacaccataccctgctaatgtttgtacttgtttgtagagacaaggtctctctatgtttcccaggctggtcttgaactacttccctcaggcaatcctcctgcctcccaaagcattgggattacaggggtgagaaaccatacctagccaggttgatttatttatctatcaactttcattggtcattagttgaaaatctccccccaaaaagaaaccagtgaaatttctcaggagcaaaaaccaaggctaaaatataatggtataacatcttcaaactgtgagaaaaaaattattgttaacctggaattctatacccagctgaagtatgattcatatgtaaggacaaaatacttttcagattaaaacaaattaggagtttttatttatgtgcagggtctcaaagaatgaactgtcagactatttccttcaagtaataggaaataaaacctgaaagaaaaaaataagtgtaagggacaaatataaaaaaaaaattggcaaatagatggacaaatgtaaatgtgtgtgtatgttgtgtgtgtatgtgttgtgtgtgtgtgtgcatgtgtctaacacatcataggaaaactgccaaacattggaaacaaggagaaaaatattaaaagcaataaagagtgcattgcatataagagaatgtatataagatataatattgcatatgtgtactacatattgtttatatatacctacatacatatgtagatacatataaacacacatgtattatgtggtaataatgaaatattattagcttttaacaagttagctagaactgaaacactggtgaacaataacataaagtatggtgggaataggccagagataaagttttctaaattttttaaccatttaagttgaagatgaaaatacttattaattttagactccatcatcaagtatgcatgattaatgttctttaaagaagcaaatagaagttttatttatatttttaacatggaatagggcttgttattttattttaaatttaaaaagaagtacatatttatcatctgcaattgttgttttgaagtatgtatacattatgaaatggctaaatcaagctaattaacatatacattacctcacatactgatcattccttctgttgtgagagcacttaaaatctatttcttagcaattttcaagaatatagtaagtttttactaactaaaatcaccatgttgtatgatagatctctttgtcttattcctctggtctaactaaaattttgtatcctttgatcaacatctctccaacctactccccatacacgcctaccaactctagccccaaatcactattctattctctacttctatgagttcaactattttagattccacatataagttagatcatgtggtacctgtctttctgtgcctggcttattctctaaacgtagtgtagtcaaaatttatccatgtccaaaattttcttctttttaaggctctttttaaagaccaaatagtatttcagacacacgcctacacaacacacacacacacacacacacacacagaggaacttcaaaaaattagtgaaaaattaaattaaaggataaaaattaaaaatataaactttgtttctcaatgtaagctccatcaagttcaattaactttgtaattgatgacatcagccattaagtcaatttctaaagaactgaaggtcctggaaatttaatcatgtcagtgcagtctttttcacattattgacagaaaataagtgggttctctttacagatctttttaacattaagaagcaaacagaagtcagaaggagccaaatcagcactttcagatggatgtgtaatgattttccatcaaaactccccccacagtgttcttgccaatgagagaaatgagcaggagcattgttgtggtggagaaggattctggtgaagttttctttggcatttttctgctaaagctttggttaacttttttgaaacactctcataacaagcagatattattgctctttagtcctccagcaactcaacaagcaaaatgccttgaggataccaggaaactgttgccatgacccttgctcttggctgtctgattctgtttggactggaccacttccacctcttggtagccattgctttgattgtgctttgtcttcaggatcatactcattaagacatgcttcatctccgggtacaatactttgaaaaaatgcttcagaatttttatcccccttgtttatatgtttcattgaaaactctgctcttgtctgcagctgacctgggcacaacagttttagcacatatcaagtagaaagtttgctcaactcactgggtgtggtggctcacggcagtaattccactttgggagaccaaagtgggcaggtcacaaggtcaggagtttgagaccagcctggccaacatggtgaaatcctgtctctactaaaaatacaagagttagctgtgtgtggtggtgggtgcctgtaatcccagctactcgggaggctgaggcaggagaatcacatgaacccaagaggcagctcagctttaacttttcagagagaattgtgtaggctgaaccgaatgagatctctatggcactggctattgtttgtgttgttaattgttggttctcttcaattatggcataaacaatatgaattttttttattattgcttacgtacgcaaattgatgtggatagtctgctgttgcatactttatcttcaacatgtctcatcccttcttaaaacaaggtatccatttgaaaagtactaattttgggggggcattgtccccatgaactttttgtaaatcacctatggtttcatccttctttgacccaaacttaaccataaatgtaatttttttgcttcaattttaacagacttcatgttgctcagataggggctcttttcaaactcatgccttattcttctactaagtgttgttcacacatattaggtatgagtttattttgttgcaaaaaaatattttgaaatccatacatgattgttttttcatagtaatcattttccatgagcttattgaagagcccttgtgtgtctgtatgtatatcacattttctttatctattcatccactgatagacacttaggttgatttcacattttgactgttgtgaataatgctttgataaatatgagaatgcagatatgtcttcaacatactgatttcatcttctttgaatgtacacccattagtgagattgctgcatcataccgtggttctattttaacttttgagaaacctccacactgttttccataatggctgcaccaatttacatgctcaccaacagtgtgcaaggggtccctttcacacatccttgttaacacttgttactttccctctttttgataatagctcttctaacaggtagggggtgatatctcattgtgggtttaatttgcatttctctgatgattagtgacattgaacatttttaaatatacctcttggccaagtgtatgtcttcttttgagaaatgtctattcataggcttttctcatttttaatctggttatgttcttactattgaggtgtttcaggtcttatatattttggatattagccacttatcagttgtacggtttgtaaatatttttcttccattctgcaggttgtctcttcactatattgattttttattggttatgcagaagatttttagtgtgatttaatcaaatttgtctatgtttttattgttgtctgtgcttttttgttcatagccaaaataccattgcccaggccaatgtcaagaagctttttcctatgttttcttcaagtagttttacagtttcaggtcttacttttaagtctttaatctattttagttgatttttatgtatggtgtgaaataagagtttaatttcattcttctacatatagacatccagttttactaacatcatttatttaagagactggcctttctacattgtgtgtttctgacacctttgtcaaaatcaattgacagtaaatgtatggctttatttctcagctgtttattcagtctcactggtttatgtgtctgtttttaatgccattaccatgctatttagattactataggtatgtagtatattttgaaatcaggtaatgtgaagcctctggcttgttctttttgcccaagatttctttgttcatttggatcttttgtgatttcacatgaattttagaatggtcttttccatttgataaactcttaagcataattactaaaaattttcatggaacacatagtttcctcttgataaaaaaatagaataagtaaaattataatgacatttgtataccatttactgattctttttgttctcattgtttgtgtaaaccttgaaaagtaaggaattaaaaagaacgttttttctttaagcataatttatttaaatcatatttcggattttgctgatttggtaggtgctagctggggttaatggaggccacaaggaggtttccttaggtattttgcacttctttccagcaagacaaagaaagtaatatgactgaaaaaaaataaagataaatgtaacaaagtatctgaggaaagcaacccgaactttttatgttatctatttcccctaaatgaaatatgaagcactgttgaccttttaccctgaatgagccaaacttgtagcagaaacgggagcttggctgttgtctgtgcattaaaacctttctctcatttactatttccaggtaacaaactagaagagcgtcacagcttgtccagagagaaagctgagcccattgtcaaaatcagtactgcagcctttgctgactgtgactatttaacatctcaacacactgggggattaattacttgaacatttgggggaataacaacaacttgaaactcatattttaacctgtatgtcatgaatattaacaaagacaaatttataactgacttgactattttgtgtgtttttgcttttaagaaacagttggcttctgtaggaatgaacaataagaaataacaaaatttatttgttagtaaattttcctccagtgaatatgcatgcaccagactcactgcagcaaactcagtcgtctttgaaggataaaacacagaaaaccattttgttgtacaatgagatgagttatttgaacttaagacatgtttttttttcataagtttttatgaactaggtatcgcatgtcccataaggggtaatagatgtgttttctttgctctgctcagcacagatttgaaccatttctccaactccagggggctcagcctcatgctcaccttcaaaatcacaacaaggcctcctctacaccttttgcagctatggttaatacccagtgagttcagcctctgtgggctttctgcacctgcacatatgtacctccgtgttttgttatctcttggtggatactggaattgtaccctgggctgtacagcatcaagttgcatttaaatcagagagctggcatatctcactcaccacagcaggtctgcgtcagctgaatcttgcaaagcgtgtcttatcttccagagcataaatcagtaagggactgcaaagctgctatgggatcttctccctccctgtggaaaggaacacagtccaggaatgccctcaaatggacaaaccactctcttcatatcatttgttgtcttcattctatttctaattcaaagacagctgaaagccacagacaatagcagaatccctgcatggttggtggtcctggaagaagactggagagagaggtggagtggatctcaaggcaacaattagttagagctcctgctctttgattgcttgagaactcagaaaaggatgactaaggtcacttaggtgtagctaaaagggctttagagtcttaggaaaatgagaactctgaggagcctacacaccagtcactaagctggcactaagggtgtttgatcagggaagggtcactgcttgtttgagatggacaaccatggctctgacccattggctgacccctgaggagcctgtggggctccctagaaacaacccagaagtggcttcatccagaacaaagaggaagtttctaaaaggtgtagacatactcagagacaaagctggctcttgcctgagtgacaaagacattgagcttgcaggggtcccaccacaaggtaggtagaagcagagtccgatggttctgatcccacagaccattcattatccagtgttcactgcatttctactccacaaccagcaagctctagggaacatgttttttaaaaattaaagcagaccttgttgatgttatagtttttttggaggaaaaaaattgacttatgatatataatgtaatattatatataatatattatataattatatattataatttgtattagatattataaaatcaagagagtatgtaatcaaggcactaatacatggaacaggaagacagtatagagtgttggaagggggcagtcaatacgaatgaagcactgatcacttagagacgagaacagccctgagagcacaagcgtgacttcactgccttctgttccccagcacctgcctctggcctgtgccctagaaaggacaccaatatattgcagttaaacatattaaatgtggtgagatttggactgaatcttggagattaaatttcatacaagaaaaaacagcattattagaagtctatgaaaaaaatagaatgtttctctaaaaactgacaaagtgtaagagctaaaagagatcaggaatgtcccttttaacccacctgaccctcccctggactgttaattccttaccccattcagtgcccagcattcaataaatatctgcttattatttatgctctcttattccacaccggtaggttagcaaacatataatcaattcattttggataagagcctttctcaaattgattatatatttccttcttacacagagtaagctgaacatagtttaaacttttttgttggatgttgtccaacatgttcattgaacaaataaagaaactaaaacttggaaaggggaagagctcgccaatgtgtcacggcccttgagggttggcactgggttcaagctcagtgtcaatgttgttttcacactggagacaatctcttattttcaccagacgggcctttgtgaaacacatgaaggaaccctcagaagaccacttcagagacccccccatgaccacagtggagagagtcaagagaagttcattcaaggaggggctggtaaagtagcaggagctgggccatgcagggactcacaggccgcacctaggggtttacactcatcctaaccgaggcagaaaaccaccgcagagtgctgaggatggtgaaggcatgaggatgagttggaagaagtgagtttggctctgctctggagaatggctgaaagggtagtgggaacaaacggaggcagccaccgaggaggccatcgcaggtgcaggtgggatgcaaaggggagtgggcacaggcttggagaacagggatgcgtgggagtgcaaggcagtcaggtgggaaaaggcagtaaatacgagtggcttctccagaatgtaagctctttccccttctccaaatcatccagagcaaaggccagactcttggccacagtgtaaaaggcctctgggaatcacacccaggcttccactccacaccacaccatgccccaacacgcctccataaaacttgattctccttctacctggagctcttctacccactttctacctttgcccaaacaagctcagtttacctctcaggtctcaagatcgatgctaccacccctggaaagtcttcctcgatgctcccacccacccctttccatcggccacattcccatgacatgggttctttctctacctccactgaggcacagctctgcattataactgcctgatcacccacctgaccctcccctggactgtgaattcattgccccattcagtgcccagcattcaataaacatgtgcttattatttatgctgtcttattccacaccggtaggttagcaaacgtataatcaattctttttggataagagcctttctcaaattgattatacatttccttcctacacagagtaagctgaacatagtttaaccttgaacacaaggtcatcattatgaatgcagtcacaattaaagaatatcagacattagatagtctatcccatgcattttttagatgggtaaattgagacccagagaggtggagggaccatggtttgaggtggtaaatctatgatttgaatcttagcaccctgacttctagtctagccctgaagaaagctgcatccgaggagccatggtcaaattctctgggtatttaagatgcctagactctttgctccagcaccacagggctccaattgttgtattttattttagttattgtgcctgttttcatagctcttctgcctcctcccatgttatcaactcacttcttaatccttcagtctatccaaatcaaacaaactctatttgttttgttttgttttgtttttaagggacaagatctcattatgtcactcaggctgtagtgtagcggcacaattctggctcactgcaaccttgaactcctggcctcaagtgatctttcagcctcagtctcccgaggagctggaactacagacggaacgtaccatcaggcctagctaatttttcattttttatttttattttttttatagagacagggtttcaccatgttgcccaggctggtcttaaattcctggcctcaagtgatcctcccactttggccacctaaagtgatgagattacaggctttaaccactgcacctggtccctatctttattcgtatgtgtttgggaggcagataacagttttacctccccaaagcaccacagtgcttattattatctatgaacattgatgccttactacccagtctcctccactaaactaaaattccaggtccattttattgtcctctctgcacctggtgcctagcacagagcccagcatattcacatgtgctgaagaattatctagcttcttaagcatcatataaaataagcattattagtcatagaaaaagtataagctccaattcactggtttagcgatgcctattttcctaggtttcttttctgattcctagatgtgattgacagagcttagttctactaagcatgctgtatttagatgaagtaagaagtgactggcatttgtggagggactgtgtccttttttgcagtaattagaggttgttggcacatccagtctttgagactgttttccttacggctcccttttcgtagacagttgcagcatgagaagctgaaggaattttatgaagtagacattggagcctcccagtgattgccccttcggggttttgcagcaggcatatgctatttgcttggtccagagtgaagcgcctctacttttctggagaactgttccttcccagctacaataaggaggctcaaggcagagcgggtgtcattcatttgtttaatgtagttgctgtcttggtatccatttttagtcctaataaaagttatttgaaacccggttgtaccatgtgtcactttgggcctaattaaaacttcccctacccatggggttgtttgcagcataacccacttgttcctcatcccactgaccaaaaatctaacacacccacagctactgaccatgagaaaaccaatgatcaacaccagagtcatggaaatgagctccccttcacgcatgatttctttaaaggagccaacctgcagcttccctgcaggagagtctgaaaaactcccaggaatttaacaaaggcagagtctcacaggcctcaggcctctctcttccctgctgtctgagcttcctgcctcctccagacctcctgctgtcctctcagcaacacctcgaacctctctgtgacttataagtaatgaattccttctgtttcaggcattttggtttcacctcctcagtgtgtttcatctgacagacacacccaggcccaacatccccctggtcagagtgctcctacagatggctctcttggcttatggtcactcttaagagggtaagaccctcttaccctcttaagagttatgtgatttgtatcattatggtttcctgtttgtaaaaaaaaaaaaaaaaaaacaggaaaccataatgatacaaatcgcaacagcaggatcacactgcctggctaaaggcaattgctttgcagtgaacacgtaacttaagccatgtcaattaaggtttttccctggaacttttggaaataaagccatggaaagagattcttgcaaggtaagggtggcaaccatgttttcctccatgaaagcaaaaatgaacaacttaaaacaacgaagttgagatgcagagaggagtagagatgagagggcatggtgactgagctcaagtccctaggggtccagcaccaccattccccgccgtggaatctgactgcaacacctctaagtcacaggaatgccactctgctgcacctagcatctgcaaccagaggattcctcagtgcagaaaacacaggagatttagagaagcccatggaggacagacctctgatatataattagagaaaagccaatggtttagagctcattcctcatctgggaaatctgttgccatgaaccaaaaccaaaatgagctttagggagtgattttatgggttaaatcccagagtctgaaacaaggaagcgagcagccccctcccctgctgccctcttcaaagcctcctgtgtcacagctctcaggctaagcctctgtgctgaaacattacaccatttcagagagtaaatctggctctagagcagggtctcagcccagcataggaagtgtttcctaaaaagcacagcttccctctaggggctactttataaggagataagcctcctgcagtgtatggggagtactccaggagagttgtcgggatatgggggaatcacagaggaaatgctaaacaaattgtttgtgatttgctttgctagttctgctcacttccaagagtctgtgattcttggcttcagtcacaagggcaagtcagttgggcaaattcaaaacaaatgtcaaaaccattatctggtgagggagttggtgatttctcttctgctcttaatgaaacctccaccctgttttcctgaaggtacagttcgtcccatccttccctccccttccctggctggaagaggcagcctccctcctcccattgcccaggaggtactctgccaatatcagcaacccccactgtcatttctgtgcaaatcccctatcatcccagtaatctggccagccctacacatcagtcagccttgtatagctcgggttcaccagggagcaggctctagagctctggatgaacacctgcctatgtcttggctctgaaacttgcacctgctctataagtagatgaccccgcccctgcagacatgggtctgtgtgcggctgacatgcacaacctggaaagccatggaggccctgccttagtcactaaggctgagggcaagggttcctataatcccaggacaaaccttgtaggtatccagtgggataacctgtaagtatttcagcttctcccatctgcagctattaacccttgaagtgcaacagtaaatggaggaaatcggccaggaaagaggagaccacagtgtggattcttgaaggccttcacgtggggagggatacaaggctctaataacatgcatcagatgtggatactgatcattcacactacagattatttccatcagtacttcttttttgatgccagaaattacatttggagcctggctgagactctgatgtgccagtctttataaatgttgatgttcagtcagaatggctattattaaaaagtcaaaaaaacaacagatgctggtgaagctgcagagaaaagggaacacttatataccattgtggggacgtaaattagttcagtcactgtggaaagcagtttggagattcctcgaagaagtaaaaatggaacaaccattggacccagcaatcccattactgggtatctacccgaaggaaactaaattattctaccgaaaagacacatacactcatatgttcattgcagcacaattcacaataacaaagacatggaatcaagttgggtgtccaccagtgttgaatgggataaagaaaatgtggtaaaagatgaaaatgtggtatcctctgtgaccataaaataaaacggtactaatttaaaagtcaatagactaatttagaagtcagtagatgccatgagtccccattcatccctgtgctgaaaattatgacttcattcctctctcttgcattctgcattctacttcttctttttcttcttttgtttttgagaggatcagtgtaatctttattaaatttatttttaattattatgggtacataatagtagcatatgtttataaagtacatgtgatgttttgatacaggcacacattgtgtaatgatcaacttagagcaatcggagcaaacaccacctcaagcctttatcatttctttgtgttaggaacattccaattccactgttctagttattttaaaatatgcaataaattattgctaactatagtcaccctgttgtgctactgaatattgaatcttgtacattctctttaactgtatttttgaatccattaactttccctttttttgttgttttttgtttgtttgtttgtttgtttttgagacagtctcactctgtcgcccaggctggagtgcagtgtcacgatcttggctcactgcaaactctgcctcccaggttcaagcgattctcctacctcatcctcctgggtagctgagattacaggtgttcaccaccacgcccagctaatttttactatttttagtaaagacatggtttcaccatgttggtcaggctggtctcaaatgatcctcccacctcatctcccaaagtgctgtgattacatgcatgagtcatcgcgcccggcctaaccttcccctctttatccttcccccacttcccagcctctggcaaccatcatttcactctctgtcttcataagtgcaatttttttttcagctccttcaaatggtgagaacctatgatattttcctttctgtttctggcttattttatttaacagaatatcccccaattccatctatgttgttgcaaatgacagagtttcattctctcttggctggataatattccactgtttctatgccccgcattcccttcatccattcaactgcagacgtgctccacttgctctgagtcatcctccctgtgtcacctcccgtgtgcttcagaatagatgttgttggctccacgtcctcattctacccacgtcagctgtccctgctgacagcaagtttctgccggggtgccccacatgtctaagcccctgtgttggctcggggtctcagggtttaatgacatgtgcttaggttgccaatggccagtggaagcagagcccagacacgcctcaggatcttctccagtgcctgcatccacattgccagagacagctcaccccagccaccatgaccagtgcagagctccccacgcctcagcatctagcatccaggcccaactgctccaaccaggccaagtatgggtctcctccctgacacctacttttcatggcagaacacctacttttcacgggaggaactctcgtctctctctctcatcaggctgtgataacgcctcatggccccagaagtccaaagtctggttgttgtagcatggatatgggtttgctctaaatctctggttaaaatgtgacctccaatgttggaggtggggcctggtgggaggtgtttgagtcatgggggtggatctttcatgagtggcttggtgccctccctaaagtaatgagtgagttctcactctatgtgttcatgaaacagctgatttcttagaggagcctggcacctcctccagctctcttgctgcctctctcaccatgtgacatgcctgttcctcctccaccttctgccatgagtaaaagcttcctgcaccctcaccagaagctgagcagatgctggtgccatgattattgtacagtttgcagaaccatgagccaaataaacctcctttctttataaattacccagtctcaagtatttgtttagcaacacaaaatacactaatacactgggtaacttcatagtcagcagatgaccacccttttgtctcattccctctcttcccaatcattccagatacttttacatctgtccttcaaaccatggctggagtactgtgggactcaaaatcgataaataattaatagattctaaattctgtgtgaaaagagagctaataactagcataatcttaggaacatgctagaaatggccctagcagagatggggcagagggcagtatgtttttgaagggagtgaaggggaagacagccagagcagtgcatgagggaacccccaggacaggggtcaggacaatgggagagaggggagccatgaagggcacactttgctttctccactcctgagggctatctctgaattttgctctccatttagctgagagtgtgaaattgagaattcataaaatcacttttattcctttaaatggcccttatgaaaagctttcaagagtcatctctaaatgtacttttcagttgcattttcatgaacaatattcaaggtcagaatgagcaaatgtctagttagccattggagaaaggaccagtagcacacagatatttccagcattctagagacatgtaaagtacccttggaagagccggcatttaacttgttgaacattaaatgccattaatgctcagctgcacagaaatttccatttctgaatattcttctccaaatttctcccttgaaccatattattttagttcagcctcaattataccatcaaaattccaccattcataaatgtattaccattctgaaaatgtacttgatggcatctttataccatgctgtggaaaaatgtgtagcaataaaaaaagataaatcacaaggttttttttttttttggagccaattagccaaacaaaacttaaatataaatcaagcttggtagaaaccacaggtcatgctcaagtttatgaattcgttatagagcagcactgccttgaattcaaccttgcctagctttggtcttgaccacagcatcacaagagtggtaataatatcagtaggtttactgacatgcacaagcatattcccaggttgcagtgcaggacccgaggtagagccgagactccccaaaaaggcagttcagaggtaggcacgcccagtgggtctgcatcagagcccctgcgtctggttcagggactgagatgagtttctcggcttccctgagatgtaatatttttacctatcaaatcaaaattactgtaacttctgcctcactgattgtttttgttagaattcaataaagaaatgtctcaaagcagtcacacggtacctgatacggtgaacactccatatgttgttctttattatatatacacacactaagttatatacataaatacattaaaaattaatttatatttttcataactataatttatatttattcataactataatcacataattcaattatatgtaatagataattttatagttatataatgtgtgtgtgtgtgtgtgtgtgtgtgtgtttgtttaaaatgtccttggaaaacagaagcaggtagagatgggaggagacaggcattgttcttcgggctgggctggcatccagggggcctctctggccagccaattgcacatcttctgagcaagggagagggaacatggaccagagaacagccattggaagagaaaagcagaaaagaaattattttcagttttcccgaatttctttccaaagtcatttcaaagactaggagtgaaggctgaggctgggtctgggacccccaaacttcccagccactctgtgacaaaggcaggttcgagacgattattccctctgcacaaacaaggaaacttagggtgaaggaggagctcaggaggagttagcagggaaacctggcacagaccaaggccctctaatgcccacagtgtgccgcacgattggccctcaccccacacccctgaggctccgttttcaccccatgtcctatagctagccctgctggcttccctgtggtttccatactccaggtaagctcaggcagtggggcttttgctcctgttgtcccctctgtggaaactctcttttttcagagagccccacagcttactccctcatgtgggttggttctgtgtcccacccagatctcattttgaattgtaatcctcacatgttgagggagggacctggtagaaggtgattggatcatgggggtcatttcccccatgctgttcttgtgatagtgagggagttctaacaagatctgatggtttaaaagtgtttggcagttccccgcttactctttctctcttgccaccatgtgaggaaggtatttgcttccccttcaccttcctccatgattgtaagtttcctgaggcctccttagccatgtagaacagtgagtcaattagactttttctcttcattaattactgtctcaggtagttccttataacagtgtgaaaacagactaatgcactccccaccttcatccaggtgtttgcttcaatgtaactctatgtgagaggccttcctggcccatatcatctgaatagcacccccattattttctatctccaatactgttttctttttctctcttttcaccacccaactcataataaggtgattgtctacaccacccatccacaccaactgtaatgtaagttctaggagggaaggaacattattttattctttgctatattcggtgcatggaacagtgcctggcattaataaaaatattttgggtgtaaaaactctaggcttagaagcctgatcctaaaatctgttctgcctaagttctgtgtactctatcagagacctgaacattggtgggtacctggctgctatggccagccaaccatatgttttataccagtgaatgtggtgtctggaaaatgggttgagctcttttctctttttcatttatcttgggcattgcaagactttgatctactggattcaacaaaagaacactttgaccctatgtttataagtaaaaatgctttggtcaaaattattccaactctggtgaaatttaatttgaaagcattttccaaaaccaattccacaagccattttgatttgttagtgctcagttaatgttatcaggtatttggctgaaaccacctatataacagttaacataggaccacagagtaaaagttgcaggcatagttaaaagttaaccagccattgtttctaagctcatcccataattgcttactgcccagaagccatgtagccagtggtcacaagggctgtaacttctcctaattgctcttatagatagcatcattgttgaaaacaaatgcttagtgctacaaagaagaaccagcactgagacaaaggatctctcagcaaggcaaattttcttctgcagaagggtgcttctcccatgtggagcaatggaaagagcacaaagaacaaaacagagcaggggtttttattatctcttaacgctgcttgtcactgttactgtgtctgcctccattggctagagttgtaccacacagtctaagctgaacctggttggttaacttgaaaaatgcagaaatgtagttacatcagcagtgggaagacaagaagatcagtttcagtgggagaagtcattgcattgggaggggtaattcacagagtgggtagcagatgtggaatgtgggctctatagataaggactggcaggaatgttgtttaccagggctgggggaatatagagagtaaggaagtctggccttgaaatcagggaacaaaggacaagaaaacttaaacaagctaaacctttgaagaagaatttcttactgtagtcaatgatcattattgtaaaacctatgactgttcttcaaaatatttttcagacttgtcaaccactgtaccaaatggcactgactggaccaagggcccattccaagaaattgattcaacaggctgacacccctgcccaacccagaaactggattagtgcaagacaatcaatactctacacccctatgagttcatccctagccaatcagcagctctaattccctagacccctgcccaccaaactaccttaataatcccagcctctaagttcttaggaaggtagatttgagagatttctcctgtcctccttgcttggctctcttgcaattattaaactctttccctgctgtaacacctactgtctcagtgtattgtttttctctgggcagtgggcaagaagaatccaccaggctgtacattgtaaccaccctttcccttgccccttaggcctcaggacagcagtgttcctcactgttgctagctcaggggttctatgccatcttttgttaattttatttaagcctactcacacttttgtaaatagttctttccttaaaccctcttcaattacctagtttgcatgtgttaaccacttcttgcctgctggtcccagacttatatagttcatttatttataatcagtgaagatactttcctgcttccacataaaaccctaggcagtgacttttctgttcattcttaggggaaaacaaaaaacaaaaaaactatgggcagtttgagttaaaaactaagtcaaatttggagggaggagccaagatggccaaagaggaacagctccggtctacaggtcccagcgtgagtgaggcagaagatgggtgatttctgcatttccatctgagggaccgggttcatctcactacggagtgccagacagtgggtgcaggtcagtgggtgcatgcaccgtgcgcaagccaaagcagggtgagggattgcctcacttgggaagcgcaaggggtcagggagttcgctctcctagtcaaagaaagtggtgacagagggcacctggaaaatcgggtcactcccacctgaatactgagcttttccgaccggcttaaaaaacggcacaccaggagattatatcctgcacctggctcagagggtcctatgcccacggagtctcgctgattgctagcacagcagtctgagatcaaactgcaaggcggcagtgaggctgggggaagggcgcctgccatttcccaggcttgattaggtaaacaaagcagccgagaatctccaactgggtggagcccaccacagctcaaggaggcctgcctgcctctgtaggctccacctcgggggcagggcacagagaaacaaaaagacagcagtaacctctgcagacttaaatgtccctgtctgacagctgtgaagagagcagtgattctcccagcacacagctggagatctgagaacgggcagactgcctcctcaagtgggtccgtgacccctgacccccgagcagcctaactgggaggcaccccccagcagaggcagactgacacctcacacagccaggtactccaacagacctgcagctgaggtcctgtctgttagaaggaaaactaacaaacagaaaggacatccacaccaaaaacccatctgtacatcaccatcatcaaggaccgaaagttgataaaaccaaaaagatggggaaaaaacagcagaaaaactggaaactctaaaaagcagagagcctctcctcctccaaagcaacgcagttcctcaccagcaacggaacaaagctggacggagaatgactttgacgagctgagagaagaaggcttcagatgatcaaattactctgagctacgggaggaaattcaaaccaaaggcaaagaagttgataactttgaaaaaaatttagaagaatatacaactagaataactaatacagagaagtgcttcaaggagttgatggagctgaaaaccaaggctcgagaactaagtgaagaatgcagaagcctcaggagccgatgcaatcaactggaagaaaaggtatcagcgatggaagatgaaatgaatgaaatgaagcaagaagggaagtttagagaaaaaagaataaaaagaaacaagcaaagcctccaagaaatatgggactatgtgaaaagaccaaatctacatctgattggtgtacctgaaagtgacggggagaatggaaccaagttggaaaacactctgcaggatattatccaggagaacttccccaatctagcaaggcaagccaacattcagattcaggaaatacagagaatgccacaaagatactcctggagaagagcaactccaaggcacataattgtcagattcaccaaattgcagatgaaggaaaaaatgttaagggcagccagagagaaaggttgggttaccctcaaagggaagtccatcagactaacagcagatctctcagcagaaactctacaagccagaagagagtgggggccaatattcaacattcttaaagaaaagaattttcaacccaggatttcatatccagccaaactaagcttcataagtgaaggagaaataaaatactttacagacaagcaaatgctgagagattttgtcaccaccaggcctgccttaaaagagctcctgaaggaagtgctaaacacagaaaggaacaaccggtaccagccactgcaaaatcatgccaaaatgtaaagaccatcgagactaggaagaaactgcatcaactaacgagcaaaataaccagctaacatcataatgacaggatcaaattcacacataaaaatattaactttaaatgtaaatggactaaatactccaattaaaagacacagactggcaaattagataaagagtcaagacccatcagtgtgctgtattcaggaaacccatctcatgtgcagagacacacataggctcaaaataaagggatggaggaagatctaccaagcaagtggaaaacaaaaaaaggcaggggttgcaatcctagtctctgataaagcagactttaagccaacaaagatcaaaagagacaaagaaggccattacttaatagtaaagggatcaattcaaaaagaagagctaactatcctaaatatatatgcacccaatacaggagcacctggattcataaagcaagtcctgagtgacctacaaagagacttagactcccacacattaataatgggagacttcaaggagaactacaaccactgtcaacattagacagatcaacaagacagaaagacaacaaggatacccaggaattgaactcagctctgcaccaagcggacctaatagacatctacagaactctccaccccaaatcaacagaatatacatttttttcagcaccacaccacacctattccaaaattgaccacatagttggaagtaaagctctcctcagcaaatgtaaaagaacagaagttataacaaactatctctcagaccacagtgcaatcaaactagaactcaggattaagaatctcactcaaaaccactcaactacatggaaactgaacaacctgctcctgaatgactactgggtacataatgaaatgaaggcagaaataaagatgttctttgaaaccaacgagaacaaagacacaacataccagaatctctgggacgcattcaaagcagaatgtagagggaaatttatagcactaaatgcccacaagagaaagcaggaaagatccaaaattgacaacctaacatcacaattaaaagaactagaaaagcaagagcaaacacattcaaaagctagcagaaggcaagaaataactaaaatcagagcagaactgcaggaaatagggacacaaaaaacccttcaaaaaattaacgaatccaggagctggttttttgaaaggatcagcaaaattgatagaccactagcaagtctaataaagaaaaaaagagagaagaatcaaatagatgcaataaaaaatgataaaggggatatcaccaccgatcccacagaaatacaaactaccatcagagaatactacaaacacctctacgcaaataaactggaaaatctagaagaaatggataaattcctcaacacatacactctcccaagactaaaccaggaagaagttgaatctctgaatagaccaataacaggagctgaaattgtggcaataatcagtagcttaccaactaaaaagggtccaggaccagatggattcacagctgaattctaccagaggtacaaggaggaactggtaccattccttctgaaactatttcaatcaataggaaaagagggaatcctccctaactcattttatgaggccagcatcatcctgataccaaagccgggcagagacacaaccaaaaaatagaattttagaccaatatccttgatgaacattgatgcaaaaatcctcaataaaatactggcaaactgaatccagcagcacatcaaaaagcttatccaccatgatcaagtgggcttcatccctgggatgcaaggctggttcaatatacacaattcaataaatgtaatccagcatataaacagaaccaaagacaaaaaccacatgattatctcaatagatgcagaaaaggcctttgacaaaattcaacaacccttcatgctaaaaactctcaataaattaggcattgatgggacgtatctcaaaataataagagctatctatgataaacccacagccaatatcatactgaatgggcaaaaactggaagcattccctttgaaaactggcacaagacagggatgccctctctcaccactcctattcaacatagtgttggaagttctggccagggcaattaggcaggacaaggaaataaaaggtattcaattaggaaaagaagaagtcaaattgtccttgtttgcagacgacatgattgtgtatctagaaaaccccattgtctcagcccaaaatctccttaagctgataagcaacttcagcaaagtctcaggatacaaaatcaatgtacaaaaatcacaagcattcttttacaccaacaacagacaaacagaaagccaaatcatgagtgaacccccattcacaatcgcttcaaagagaataaaatacctaggaatccaacttacaagggatgtgaaagacctcttcaaggagaactacaaaccagtgctcaaggtaataaaagaggatacaaacaaatggaagaacattccatgctcatgggtaggaagaatcaatatcgtgaaaatggccatactgcccaaggtaatttacagattcaatgccatccccatcaagctaccaatgactttcttcacagaattggaaaaaactactttaaagttcatatggaaccaaaaaagagcacacatcgccaagtcaatcctaagccaaaagagcaaagctggaggcatcaggctacctgacttcaaactatactacaaggctatagtaaccaaaacagcatgctactggtagcaaaatagagatatagatcaatggaacagaagagagccctcagaaataatgccgtatatctacaactatctgatctttgacaaacctgagaaaaacaagcaatggggaaaggatttcctatttaataaatggtgctgggaaaactggctagccatatgtagaaagctgaaactggatccctttcttacaccttatacaaaaataaattcaagatggattaaagacttaaacgttagacctaaaaccataaaaccccagaagaaaacctaccattcaggcattaccattcaggacataagcatgggcaaggacttcatgtctaaaacaccaaaagcaatggcaacaaaagccaaaattgacaaataagatctaattaaactaaagagcttctgcacagcacaagaaactaccatcagagtgaacaggcaacctacaaaatgggagaaaattttcgcaacctactcatctgacaaagggctaatatccagaatctacaatgaactcaaacaaatttacaagaaaaaaacaaacaaccccatcaaaaagtgggtgaaggatatgaacagacacttctcaaaagaagacatttatgcagccaaaaaacacatgaaaaaatgctcaccatcactggccatcagagaaatacaaatcaaaaccacaatgagataccatctcacaccagttagaatggcgatcattaaaaagtcaggaaacaagaggtgctggagaggatgtggacaaacaggaacacttttacactgttggtgggatggtaaactagttcaaccattgtggaagtcagtgtggcaattcctcagggatctagaactagaaataccatttgacccagccatcccattactgggtatatacccaaaggactatagatcatgctgctataaagacacatgcacacgtatgtttattgcggcattattcacaatagtaaagacttggaaccaacccaaatgtccaacaatgatagactgaattaagaaaatgtggcacatatacaccatggaatactatgcagccataaaaaatgatgagttcatgtcctttgtagggacatggatgaaattggaaatcatcattctcagtaaactatcgtaagaccaaaaaaccaaacaccgcatattctcaatcataggtgggaattgaacaatgagaacacatggacacacgaaggggaacatcacactctggggactgttgtggggcagggatgggggagggatatcattgggagatatacctaatgctagatgactagttagtgggtgcagtgcaccagcatggcacatgtatacatatgtaactaacctgcacattgtgcacatgtaccctaaaacttaaagtataataaaaataaataaataaataaataaataaataactaagtcaaatttcattaggtaaaactgcccagtcccaactaataatcaaagctccaaagttacttagcactaaatattttttcccttccatagcaaagcctaaaattgcatactagctacttgcaaggatgggtcagaggaagtcaaaaaaggtgaagaatatgttctttctccatttcattatctagtatttcttctttctctgcaaattgcttattaaattttcaagctctacctgagtcaaagaaggagatgagaagaaaagagataatgataaaaaaaaaaaagtgtgaaacaaaaataacattctaagccccccttactgactgtacagaccctctcttggccaaggggattccaaaaaagcctgaaaaactgagaaaggccttgttgagaagggaagtcagacatgcctcattgtaccacctctctttggagtttagttccaactgaccagcattaacattaaaacagaaatcttaacactgacaaaacagactctttgtagcaataggacagcaagtttcaactggctctggtatagcatcacatgacagataacaggtcctaaaagaaatcaaagcattttatcctgaaacatatgtatttgatgtattttgaaattgccctgcaaagttgtcacttgtggaaaaatttgcattctgtagagaatctccttccctttatgtgtgttttcctgatccaggaggagatgcaactaagagtttgacaccttttaaggttcattaaaaaaagaaacacttaccatctattttctctgaagtctgctagttagaggctttatctacataacaagagccttgcttttatcttccccttaactcaagcatttattttagctaacttcaactctctaggcaaagtttaaatttttcaaccaattgtcaattagaaaatatttgaatccacctgtaaaccactccccaccacaccctgctagaagatgtcccaccttcctggttgaaccaatgtatatatcacatggattgattcatgtctttgcttgtaacttctgtctccctgtaacgtagtaaaccaaggtataacccaatcaccttggccacatgttctcagaacagcttgatgctgtatcctgggcaatggtcacttatatttggctcagtaaaaacctcctcaaatattttatagagtttgtcttttctcatcaacagtggtatttacctgacaagtctgatcctcatccataggaaacattcatgttttttccacctcaacaatgtctggaagaacacatgtccctcatgcagcagcacctcttctccccccactaaagcagctatccaggcatgttttgttctctacacttcccagtgacccccttactataggggcagatatcaaacttttggggatgtgccattaaagtccctttcaccagacaggaggagagacacactttcaagggcttgggaactcatagctatggagaacactaaaagaaggggaatggcaagagatgagggaagaagcaaactctacagcactcacctcttgctgctaacctgctgagtcactgcatgaatcagaaaagcctgcagccaagtttgagagagatatacccaaatcataaccctcttggggctatggcttctgagcagtaagcaatttagaaaggcaagcttagaaacactggctggttaacttttcaccttgcctgcaactttacaggattcaggccttcaccatggcattttctctgttgccctatatgaatttttatataaccctcacaaccttaactgatcaccttcattttttgtcactcttatttgacatatttgacctcaaatgccagtatttaaagcaacattacacatttttcctccaatatcctcattttactgaaattggggctcacagtggcaggatcacagacaggacatgtcaggtaaactgaatgtcccaggccccctgagcttgtgcatcatcagccagattcactcaagaaaaaagaaaccacactagtcctgtaaacagaaggaatctgacatagggagctggttaaacaggcctaggagacggaacaaaaagccaagagggaagagcaagggcacactaagacagcaacttcagggagaaactcttcgctcccaggctgggagcagagggaggaagttgtgcttactaagagcctgcagcttggaggagagatcatcaagctgggagccagcctcatgaggaggaggctggtgttagtgtctccaagggaatgtgatgaggctggttctggcactgcagaaaaacctggaaacaggaacacagcaaccagcttccgtcactggggtgaagaagtattattgggtgatgtgagcagaacaagaaaaaacaaaaaaacaagtcctgtcttcctcacccagctctccagtctccatccagcatcctctattagcagaactaacagagagacccatggcagaagaggaatgtggtttgcaggttccaatcacagcatcatgaagcaaagtataagacatggtttgcagctgggagataacagctcaataactagtaaaacatccagatgaggccaaattaatgttaatgcccaaattttgctaactcatagcacacactgtcaagagagctattttcttcctctgccacattcttgccaagagccatgaaatagaaacttttgacctctcaaaagttttcaaaagtaatcttctggacttttctctactcactaactaattccttcacatcacagcttagcctgcatctgggagcttttcaacccagcatgccctgaagtcacattcatgttctttcctttgtttattgaggagcaaagacctactgcagtccagctgctctgcctgtatctgggtggaaaataagcaagactcaaatccaagcatgttctacgaaccaacttcagcaacaataaagtgataccttgaatctttctcactcttatgtgtatatctcaattcgttcacaacttggagaggaaaagagatgaatgatttctctctgaaacattttatgcaagcttacataaaaatggactgtcacccactgtgatagtccactgtgtcaccaccacccctcctcagcctctctgccacaggtctgcctattatgtctggaaggttctgggatgcacacattctcagtccagtctccaggctgaatgcaacctcccagcagctacctgaggagctcatctcagccttcatgagaacatgcttccttgcccagagctctgcttcccaatgtcccacaaaaattcctgggctccttttagtccctttctaccagagtaatgctgtgtttcaggcaaacatggaaaatagatatttctccatctgtgtggaccttgttatcagagtccaaaccatctaggctgtggccctggtctcccaaagcccccagctgagtccttattttagtattgcttagagagagaatagatatcaaattgttctcaccatcagttagcacagagtagcacatttctgaccactggagcccatgctggaacatcatccttgtgggcccctttccctccctatcaactcatgcaaattgacacctgggaaagaagtaggattaccaacccctcaatttaaaagacgtgataaagctttgaatcccagtttgggctcagctgttatcaccttgtatcaaaataattttttagtccagattctttcagttacaagtgttagaaatctacctaactcaacttcagacagcaaactgaagctatgagctcatgaaaatggatcctggtgctcttgcagtaccatcaggattcagtctctgccaggcttctccttaagctgccttcagatttaatagactcacatcgtggtggcaaaaatgtcaccaacagcttcaaagttcaatttctaccagttcagtgactccagctaaaaaataactgtgctattcaaaacgtccaacaaaaatcccagctctaaatattattggaccaatctgagccacatggacatccctgaattaataagcactgtgacctggggggcggactaaaccaagtggccatccttgaatcaagccattccctcaagagacaggagtggaaccagccaagctagccacaaaataaagcatggacctgggtgggctctacaaagggaaactgcaggactttaaccagcggaagggaaagcaaatgccagacaagcaggaccacagctcttcctcaatgttgtgggaaatcagggaccccaaacagagggaccagctgaagccatggcagaagaacgtggattgtgaagattttatggacatttattagttccccaaattaatacttttgtaatttcttatgcctgtctttactgcaatctctaaacataaattgtgaagatttcatggatacttatcacttccccaatcaatacccttgtgatttcctatgcctgtctttactttaatctcttaatcctgtcagctgaggcggatgtatattgcctcaggaccctgtagtaattgcattaactgcacaaattgtacagcatgtgtgtttaaaccatatgaaatgtgggaaccttgaaaaaagaacaggataacagcaattgttcagggaataagagagaaaaccttaaactctgactgccggtgagctgggtggaacagagtcatatttctcttctttcaaaagcaaatgggagaaatatcgctgaattatttttctcagcatggaacattcgtgagaaagagaatacgcgcctggaggtataggattataaacagccccccaggtgtgcctgtctcttatggttgaggctgcagagatgaaataaactccagtctcccatagcactcccaggcttattaggaagaggaaattcccacctaataaattttggtcagaccagttgatctcaaaaccctgtctcctgataagatgttatcaatgacaatggtgcctgaaacttcattagcaattttaattttgcctcggtactgtggtcctgtgatcccgccctgcctccaattgccttgtgattttctattaccctgttaagtacttgatgtctgtcacccacacctattcgcacactccctccccttttgaaaatccctataaaaacttgctggtttttgtggcttgtggggcatcacggatcctaccaatgtgtgatatctcccccggatgcccagctttgaaatttccctcttttgtactctgtccctttatttctcaagctggctgatgcttaggaaaaatagaaaagaacctacgtgattatcagggcaggttccccgatactccaataccatgtatgtccatcttttgactaatttttgtgtcttatatttatattacatttacttcttatgtattgtaatatggaagtttcttggtagtccccaaactacttagcaaaaacctggcaaatgctagttgattaggttctcagaattctttggtacccgttgccctgtaaaaaataaaacctcttttgggactatgaaaacagagtgagagatagctgtatctctgaatggcaaatgggacagtcaactccctcaattcagagaaagtctggttgccagaggtttttaaaattaaatattcagccatgaggaattacaccaaaagcaaagcctgagaaaagaaagtaggaatggacattttgtttgggaggtgatctcaggaagcaggagtgtgggagctgagagagtggtcaaaagaataaagattgaccaatataaggatgcactgttcaagtcactgctgtgagcaaaagcagctcagttctgccggggcctcttgagaggcatggagaatggctcccagaattatcatctcaggacaggcagtgtaggctttttttccagttcctgtccctcattgctgaggactgcaccttgaggcaatagttcttgaaaccccacttttgggctgtagcatcagagaaatgctgagttggaaatagaggcaaatagcacaagcttcaggttggtgactgtcagaggagaccctgagcctgggtggaactgtctgccatggccccagctctcactggaagagggctgaggtgaggtggacaaaggtaccagggtgcatgttacaaggtgtgcccgcctcagggagttctgccagaccatttctcagcctgggtcagagatggacccagttcagatggataaaggtggctggatcaagctgccattcctactaaaactgtttaactacattaaaaatcaccacatttctggtcttgccagtaccatcttcctcctccaacaaacatgcatagttttcaacccattttaggacagatgtgtcatttcacaccagctctcaacattgcattcaaaacctaacagatatgctttgagactggagtagccacgggtcaggcatggtagagactccattacagtgccgctccccctgtgacctcagcattgctatcttttagtgaagctgtaagactagtaaaagacaaacatgattttctccaggcttgtttgctcctctctgggtatgaggcagcagcatatcagaatgaaacagaactgggggctacaaccctagaaaactgagctcaatcaaactggaaaatacatattctccaaccaaagccataaggttctcttctcagatgccaacagctgtgacaaatctgcatttcccttgttttcagtcactctctctgggccctcttggatcccttgcacacacctccatcagcctgcctctgggaattgtcagctgcagttagtgggacagctaggctgggtcgagagaggcagccctctccagagccaccaaaatcatcagacagtgagaatgcagcagacacggtcctgcagtagatgtggtccttctctgaaggactaagtggattaccgagaatgctggccacagggaactcttgatggcatttgtgaaatggttacaaacacaaaacctgctgcctttatttatggtcaaccactgaacatctttccaagcctagcctgtaatcctcagtgctaaaataataaggtaggcaagctgtgtttcttgattctaagagtctatgattctgccctagaaaacaaagtttatagttgctgaggcaggatcctcagggttggcttttctccctacccctgatacatgaccagtgaaaaccacaactacaattctaagccccccaactgactgaatagactccctcttggctaaggaaatcccaaagaaacccaaaaaactagttcaggccatagtgggaaggaacggtcacacatgccttcctttggagtttaggtaaaactggccagcattaacattagaacagaaatcataagactgacaagatagaccgtttgtagcaataagacaccaaattccaacctgactcaagtagagcattataaaacagcagatgctgctttgaagaaaatcaaagtgttttctctctaaatatgtttctttaacatattttgaaatgaccctacaaagatttcttttgtgggggaaatttgtattctgtagagaatctccttcccttactaggtcttttccagagagtctgacatcctttatttatcattttttttcttgagatggagtctcactctgttgcccaggctggagtgcggtggcactatctcagcacactgcaacttccacctcccaagttcaagccattctccttccaagtagctggaattaaaggtgcccaccaccacaactggctaatttttgtatttttagtagagacaggtttcaccatgttggacaggctggtctcaaactcctgacctcaagtgatccacccatctccgcctcccaaagtgctgggattacaagcatgagccaccacgcccagcctgacatcttttaccaactaccctctctgaagtctgctacctggaggcttcatttacattgtaggtactttggcttccacaacctcctttatctaaattcaagcattttttattttttctttccaacttttattttaggctcaagggtacatgtgccagtttgttactgggtaaatttcatgttgcaggggtttggtgtatagaaaattttgtcacccaggttatcagcatcataccagataggaaatttttcaatcctcaccctcctcccaccctcgaccctcaaataggccccagtgttacttgtttccttctttgtgttcatgtgtacttaatgtttagctcccacttttaagtgagaacatgtgatatatggttttctgtttctctattaattcacttaagataatggcctccagttctattcatgttgctgcaaaagacatgatcttgttctttttttatgactgtatagtatttcttaatgtatatgtccagtcactactgatgggcttctgggttgattctatgtctttactactgtgagcagtgctgtgatgaacatacacatgcatgtgtctttatggtaggacaatttacattcctttgagtattaaggctggcttcaagcttttcaggcataggttaaccttttcaacctattgccaatcaaaaaaaaaatctttgaatccatctatgacctagaatcccctggcttcaagacatcctgtctttctgggtcaaaccgatgtatactttccatgtattgatttatgtttttgcctacatctgtcttactaaaattcataaaaccaaactgtaacccaatcaataggttcccaggacctcctgagactgtatcacaaaccatggatcttaacctaggaaaaaaaaaaactctaaattgattgagatctgtcttagatagtttttggtttataccaacagcacatccaccagctgtttttctcactaggtcaaccagtaaaatcagtaaaatgcaatcactttcaatttcctcctcacccacaaatctcttctttgagcaaaactttgcacgtccaccatgttgctaagacaggctcttgaggactcctcccaaggggagtagctaagtcaggtgtggaggctagcgaagaggcctttgggggcaaagggggaatctccctctgtggatagatgctggggtatgagcacagagaaaagctgcctcttttagcctatttttccccaatatctgttttactttcataacaattccttaaacattctttcatcacagtcttaacaatgactttatgaacaggaattcttaaaaaatgtttgcaataatgtcacttctgaagaatgttctcctgccttcacctgccttccagactccaacaagctttgcttctgtctcccacccacacgcaccactaatgtctcttgtgaaaggaaaataaatcttgaggcccccaaatcactaagcttaaggaaaaagtcaggctgggaactgcttagggccaacctgcctcccattctactcaaagtcacccctctgctcccctgacctagatgcatatctgatttgtctgcttttggaaaggctaatcagaaactcaaaagaatgcaaccatttgtctcacctatctgtgacctgaaagccccctccccgcttcatgtcttcaagtgtgccaccctttgcttcaagtgtgccacctttccaggctgaagcaatgtactttttacatacattgattgatgtctcatgtctccctaaaatgtataaaactaagcggtgccccgaccactttaggcacatgtccttaggacttcctgaggctgtgtcacggatgcgtcctcaaccttggcaaaagaaactttctaaattaactgagatctgtctcagattttctggttttacactctgttgtcttagtctgagctcctcagaagcagacactgagataatgtgtcccttgagtgcaaggggaatattggaaagacaatcttaggcagcatttgtagatgagtcgggtatgagacaggaagggaaggcagccgacacagggcacattcagggatggtgtggcctcaggcagctgtggccccataccctcagggggacctttgggaaatgatgtgacacacaggacagtcccacagtagggacaaggatctgaggtgtttccctaccactcctattggttatcactgagggtactccccagggtgtcagtgtcctgaactctcaatttaccctgcttatgatgcaggagaaagccttcaggtcttggagagtgacagacactcacagaaatataccaggaacacatacaggaagcaccgaggggatccaggcaggacaccaaccgcctcttcaagtcccctagcctgctggtttcagctgtgccgtggctgtcactcctgtgagccccacaccctcctggaatcagaaactgcctgccatctctctgtctctacaacacccctcagaagactcagttcatagcagatgctcagcaaatgctttcaaaagaaacagaagcagtagcatgaggtaattgttgaccaagaaaactcagaaaacatttatttgggcaagaaagtagaacgaagaaacccaccaattcctagtggaggggaagaagattggagagggatcttcagggcatggcataaagcctgttccgatggagaaaccaaccatcctgattcccccttgctgccctgggagccacttggcattaaaaggtagctttccagggcaaagacttcccctggagagactgcaaagatctcctgtcctccctataagtcagcaaacaggcatgactgtacgtttttggttttgtctgtgtctttctggtcttcccagccatcagagaagagaggattgggctttcttccatttaagttctgggctgtaaaggcacttcctgagtaggcctgaggggctgtggtgagagaatagggctttgtgtagaggggcagcctgggtggaggctgcctgggaagcagactgttgggagggtgtgagaaggtgccctgcagcacagttcttgcctgaagacctcctggccctcacctgcttccccacgtctgctactagcactgctccatctggttgccttcaaggaaaccctccaatatcccctgtctccttccccaggataactttaagatcaaaaagtgtatgacaagagatggagaagaggagcttctgcacttggttggagaaaagaaagggaacaagtggaatttgtaccaaggaacctggagcttgcatttaattcagactgattcagctgggctaggctctgtgactctgcacttgtaacgagttccaggtgatccccatggtgctggtcagacacttcagtgagcagcaagtcaccaggtgcctgagctggtgcactgcggagtgcacacatctattacagccacaaattacacaaggccctctcctttggctagaaattacatggggctttgattgcatttctttcatgattagtgatgtgaggcattttttcatatgtttgttgaccattcctattatgtcttcttttgagaaatatctgttcatgtcctttgcccatttttctacaggattgcttggtttttttcttgttactttgtttaagttccttacagattctagatattagtcttttgttggatgcatcatttttgaatattttctcccattctgtaggttgcctgtttaccctgttgatagtttctcttactgtacagaaactctttagtttaattaggtcccgattgtcaattcttgtttttgttgtgtttacttttgaggacttagtcataaattctttgcagaggtcagcgtggtacatatgtaccacagactactacagacatgaaaaaaggatgaaatcctgtcctttgcagcaacatgtatgcaactggaggccattctcctaagtgaattaatgcagaaacagaaagtcaaatacaccatgctttgacttgtaaatgggagttaagcattgagtatacatggatgtaaagatgagaacaacagacactggggactactaggtggggagggagaaggcagaaggttgaaaactaactattgggtactatgttctacgtactatgctatttgtgtgatgggttcaatagaagcccaaaccttagtaacacacaatgtatttatgtaacaaacctacgcatgcacctcctgaatctaaaataaatgtttttaaggaaagaaactataaaaagctttaatttattattgtgtcaatcagagtccttgcagtaaagagatggctcacctaaattggacaatttgaggagagaataatattgctattttatacatgatatcttaatgaagatatcatgtgtaaaagtgtgggcagagtgtaggaaatccaaaagaatagtgcaacatcccagggccagtcacacagtagaggagagggcctttgatgggagccttggcctttggccaagagagacagccagcccaaataatccagaaaaaaaccaactcccctccttccctctgatctcctctgccctctcatgggtcaaacgcaaacctggatcaaggaaacgctgcctgcccaggtcagcctcctggggccttaacagagtggagcagagtaaagggggtatgaaggggcacagttaaatgtctacatgttgtaagtccttgttcagctgcctaagctttttctgagcaagttcaggaatatattaatataaaccagggataggcagcactgtttgtaaattaccagctagcagatatcttagtctttgcagaccagactatctctgtcacagacactcaacttggcctttgtagtgagaaagcagctgtatgcacgcagtaaaccatgagtgtagctgcttctaacacaatgccactcacaaaggcaggcctgcgggtcaaatgcactttgcccaccctgatagaaacacactcacacattctctctcttcctccccactcctcctcattctttctccccctccaagcgtgtgctgcaacaggaggaggtgaaactggatctgatttggggacaaggatggtttgcagagaggaatcggtgaacagtggtgggaaaggaaaagaaacatccagaggagattggtgagcaaaagtaggagtcatctttgtgtaagagggaaatagattttttttaaaaaatggtttaactatgaggactatgcaaatcaggcaaaaacaatcagggccaccttcaagaggcattagggagacacaggaatgggggtcccaggaggatggccccggcaggaggacaggccaccacacagcatccccacatcggccccagtgagagctgcagaaaggctgtttactgtgctggatcccacaccaaactactgattaactgtgtcacagcttaaatgtgtcattttgtcagcaaacttgtatcttcctacaagctgttaattaacgtgtcagaaaaagcgacttgcagaaggcttctcggtgcaaaacaggagcccaaaaccaaccactaagcagcacattcagaaatggctcctgacagacatgcacagatatggagcagatgcggtctgccggccagcattctaacacacagcattctaatcccaaatccttgggagcctcaaggaatgaccagctgtgcatcatggggaaagggcggcagtgggcagaggcccaggacagctctacttaaggctctgggagactgtagcggagacagccccggccccatcctctctgccttaatcacctacaggcatcctgccgttgtccacactgccccacctggtgctctctctgcacagggatggggtcaggctggatacaggagggcactaatgctactcccctccccagcagccctcaggcaaagacagagacaagctgaagtcagaagacacataaccagcattctcagccctcagtggaacaactatcacatgacacccatgtcccttactaaaggtcccatgctaacactgaacccctgctgcccacgatgacagataatctgctcatattgtctgtggcaccacccccaccccccaccacgcccatctcactaccatagttcctgcaaacgcttgtgttcacatccttgtctcagggcctgcttcttggaaaactcagcctcaggcacttatgtcccactctcctggggatgaggaatcgagtacccagtcttgggaaagcccttgcttcccagccacgatcagagggaagcatgctaactcatctgggctcgggcatcagggcatccagagaggaataaactggttcccatcaggagatcatcgtaagttagggttaagcaactaccattcattgacttgtggccagcatgaatctctgcactcaccatgaagtctccttgcacctgtctgccccttcctacctggcaaatcccaacccaaagccatggtatgtccaaaatgtcacatttctgttttgtttttaagttaccgtaatttcaactctgagcccacattcctctagcttctgtcattctcagaactgcccattctttgaaaaccaaatccaacctcacccaagtggcacaaaggtcctagttaaggcatgaaccatagaatcagatgacctagatcttaattctgcctctgcaaattattagctgggtcaccttgggtgagctgttgacttttgtgagcctcagtttccccatctgtataaagaagataagaacagtaactgcctcatggggatgttgaggattgaatgaggtaatatgcgcaaagcacttaggacagcacctggaacttggtgagctccacagaagtgtccatcccaggtacacggcccctccaggctggcccttctgctgctgaacttcaggtttataaatctcaggaaacagacacattgcaagtctctgatcctgaaagccacaagcctcccccaaccttccatcaggaaggaatctaatttgagtcctgcaaaatccttcccactctctgtgttcctccgtgacgtccctctccaatctcctccctggcgtacctccccgaggggcttcagagacagcaaccaggacaggccgccttgccaactatgctgtgctctgccctccattcctcctcgaggcaagaaagaaggggctgtagagccctgggatagggaatggcaataagagaagtagagagaaagcgcccatgaacaccacagagggaattacctgctgcatgttcgtcatcgtggaatggttatgaatgactgagtgtgcagcaggcactgtgctgagccctggaagacaatgccagggaagacagtgccgggcaggtccccttcttacttgtcaggaagcagtgctgcttcaatgtgaatgtgcacacaaatgcttcccagggcttccaagccccattcacagcaatcacttcggaaaaccatgaagtcgcccaaaatctccatttttttttttttttaacagagtctcactttgtcaccaggctggagtgcagtggcgcaattttggctcaatgcaatttctgcctcccaggttcaagcgattctcctgcctcagcttcccgagtagctgggattacaggcacacaccaccacgcccagctaattttttgtatttttagtagagactaggtttcaccatattggtcaggatgtctcgatctcttgacctcgtaatccccctgcctcagcctcccaaagtgctgggattacaggcatgagccaccgtgcccggccagaaatctccatttttaataaacatacctgcggactggaatgtagatcgtcctcaggccctaccttgaagacaagcctaggcctaaaatgttaaataccaggggaaagcagccagtaagtgcacagagttcagaaattgcagttgagtgcattatggtgtgactttatctcttctgtccggtgttggcaaggagaagctgcctcctatttccttatgttctgcagcaagcatggtgtcatacaaggaagctgcgaggtatgggtccctcaaatgattgactggggaagagacgggaggggctggcaagaacacaaagtacagtcagttacccaccgcctgctgccaacattgcattggcagagcaagctgccagcttcttgatgatcctgaactctcctgcaagtagaggcaaagcaaaagcaagtgtgaaacatgcacgtgtattctccgaagaggttgacccatgaacatgcatggcattggccagtcccaacagccttgagctacttgtgtgacaccaccacagctccagcgtaattatctgtctctctccttcacctgtctcaggaagccaggccaacctgaagacagcacatgtaggctctggctacgtctctcttggtgatctagcccagcctgggacacctccacctgtctccgtctcctggaaaaagggccccgggactttggagtatggcctgcccataatgagggaggtctttagcatgattctcagttgtaagcttgggctagacttgcagatttagaatttttttctccgattaaaaaagcacattcatgtatgccttacccaagaggaaattctgaagataggaaatatcatcaaacgaatcagggtaaatgtttgaattgtccaaacattatttgcatgcctcaattttgtgtaatatccctttaagtgattttattatttatttatttaagagactgggtcttgctctgtcacccaggctggagtgtacttaggctaaagtgatcctcccacctcagcctcctaagtagctgggaccacaggttaattaaaaaattaaccaaacctggctaattattttaatttttaattttgttttctttttatagagattgagtctccctgtgttgcccaggctagtctcaaactcctggcctcaagcagtcctcctgccttggcctccaaaaatgtggggattacaagcctgagccaccatgcctggcttctttaagtgattttaaataagaaaggaggaacggtgataataaagaaaagaggaacagattaagaagaaagtggagagggagggaaaggaagagagaaaagaagcaaggatgcatgcggaggctggaggcaggggaattgcgtctggcccgccctctgccatgaaatcccgaccttgcaagtttccacgatcttgcatagggaatcatgagacttcaggcttttgtctccatcagaaaccaatcagagccaggtacactgctggaagcagctcctgcttgcagaggatgccaggtggacagtggcagtcccctccccactgaagcctctgggtgagcagctaattcccaccctgacacatagacatctgagaaattttggcattcttttccagtagtagccacctacactgtactctgatgacagcctcccttaagcagaatgccagagctcggcaacacaaccaggagactatcactgtctccaaggcttgggtttgttgtgcattcttgttgatttcaaaacaaggcaaaaaagcacacccctcatgtgaaaaagtaaataaataaatcaggctggacctgcccctcctgctatgaaaaatcaaagtgttccttttcctgggttctattagagaaaggagcagctcaagttcaaagccagaagcaggagaattgaaggaggacatgaaagcattctctccccttaaagaaagtgcagatcccatgaaagataacccatgaaggttatctttcaggaactctagtcctaacttgattagtgtctgtgctaggattgagaagtccaagggaacacgtgccagggttgcatatggggctgaggaggggaagcctcacgcctggcagtccctggcctggggtatgccatacagcaccttggttccaagcctgtctctctcatcatccatctttctctccccctgggaatacccaacacactaaaccctatcaatctccataaaacaccactgcatgtacaacaccccttgcccgtaatgcttgcttggttctccacttccaaaaacccagcctttcgggcccctgctttggcccacttgttgcttcctgtgggctagtcaggccagaggcccactcagacaccaaaatgacagcattcatcaccagctccaaacttggacctgtactgccctttcaacttgctcctccccttccccattcaaatctccaccaactttcaagccttatccactcaggaaggcctttatccatctcatcgctgagtcccagctctatgccaggcactgttctaggcaccaggactgttggtacctcctttccccaagatctcaaaacacctgtttgttccatgttttcagccacttgttgaatactgtcccagagtttccctcattaatcataggagatcattcaatgagtcagtgcctcacaccttccttatttttttagacggtgtctcactctgtcgcccaggctggagtgcaatggctcaatctaggctcactgccacctccgcctcctggtttcaagtgattctcctgcctccgcatcccaagtagttgggattacaggcacccacaactacacctggctaatttttgtatctttagtagagacagggtttcaccatgttggccaggctgttcttggacttctggcctcaggtgatctgcccacctcaacctcctaaactgctgggattacaggtgtgagccaccatgtttggccacaccttccattttatacccagccattattttctctctggaagcttagggggatgaccagaatgccagcaaagagcagattttcatgcaagcagccaacaaactcatttttaaaagttcaacatcacatcatcagagaaatgcaaactaaaaccatggtgagataacattttacaccaatcagaatatccattattacatggaatcaactaaatgcccataaatggtagactggataaaaaaaaatgtggtacatacacaccatggaatactatgcagccataaaaagaacaagatcatgtcctttgcagggacatgaatggagctggaagccattatccttagcaagctaacacaggaacagaaaatcaaacactgcatgttgtgactgttaagtagaagctaaatgatgagaacatatggacacatagaggtgaacaacacacactggggcctaatggagggtagagggttggaggagggagaggatcaggaagaataactaatgggtactaggcttaatatctgggtgatgaaataatctgtacaacaaaccttcatgacacaagtttatctatccaacaagcatgcacatgtaccgctgaacttaaagtaaaactcaaaaaaataaaaaataaaaaaacaacagatttgtcatgaatacagagaaagggaaaggctcataccatgttggtaggtacataagttagttcatcctgtatggaaaacagtacggagatgtctcagagagctgaaaatagaactaccatgtgacccagcaatctcactactaggtatctacccaaaggaaaatatatcattgtattaaaaagacgcctgcattcagatgttcatcacagcattattcacgatagcaaagtcatggaatcaacataagtgtcaaccaatacatgattggataaataaaatgtgctatagattcactgtggaatactatgcagccataaaaatgaataaaaccatgttctttgcagcaacatgagtgcagctggtggccattatcctaagtgaagtaactcagaaacagaaagcccaataccacatgttctcacctataagtgggagctaaactatgggcacacagagatactaggatgaaaataatatacactggggactcgaaaagcagtgaaggtgaggaggtgatggttgaaaaattacccattaggtgaaatgtttactatttggggaatgcatacactagaagcccaattcccactagtgttcaaaatacccatgtaataaatctgcccatgtacagaatctaacataaaatatattttttaaagtacatttttaggcccggtgcagtggctcacacctgtaatcctagcactttgggaggccaaggtggacagatcacaaggtcaggagttcaagaccagcatgaccaacatggtgaaaccctatctctactaaaaagacaaaaaaaaaaaattagtcaggcctggtggtgtgcacccataatcccagctactcaggaggctgaggcaggagaatcccttgaacccaggaggcggaggttgcaatgagccgagattgtgccactgtactccagcctgggcgacagagcaagactccgtctcaaaaacaaaaaacaaaacaaaacaaaagattagatttttaatgatgggagatggccccagaataactgctgtggttcttagaacaacagaaataatagctatggttcttaaaacaacagaaagaaaatcatgggtggaaatcctgagtctgtttttgtttgtttttaacctctccaggatgcaccctgaaagataagtcaatgagttgatgtctgctggtgaaagctctgatgtaagagggaaagaagctacttgggagaaataaactagaaaccagaagaggaaggaatattcttccccaaacacctctcttaggaaggggaaggaagggtggcatttgttggaaataccttcagatgctgagggtgggagctgtacagccttaatgctgagggagaggaacagtggaaatgagctctgcaccaaagaggagaacaggtttgctctgaaggcgggtgggagaaaaaggtgaaggaaagcaggttaagaaagaaaagagaagatatttacggtaggcagctgtgcagtgtgcaaagttaccatccctcatagcctgaaatcctccaaaaagcattaaaaaacttacaaaatgttttctgagtggattttttattgtacctataagttgtttttattatacttataagttctagggtacaagtgcacaacatggaggtttgttacatatgtatacatgtgccatgttggtgtgatgcacccattaactcgtcatttacattaggtatatctcctaatgctatccctcccccagcccccccaaccctatgacagggcccagtgtgtgatgttccctgccctgtgtccaagtgttctcattgttcaattcccacctatgagtgagaatatggagtgtttggttttctgtccttgtgatagtttgctcagaatgatggtttccagcttcatccatgtccctacaaaggacatgaactcatccttttttatggctgcatagtattccatggtgtatatgtgccacattttcttaatctagtctatcattgatggatatttcggttggttccaagtctttgctattgtgaatagtgccgcagtaaacatatgtgtgcatgtgtctttatagctgcatgatttataaacctttgggtatatacccagtaatgggatggctggatcaaatgatatttctacttctagatccttgaggaatcgccacacggtcttccacaatggttgaactactttacagtcccaccaacagggtaaaagtttccctatttctccacatcttctgtagccctattgtttcctgactttttaatgatcgccattctaactggtgtgaaatgctatctcattgtggtttgattcgcatttctctgatgtccagagatgatgagcattttttcatgtgtctgttggctgcataaatgtcttcttttgagaagtgtctgttcatatccttcacccactttttgatggggttgtttgactttttcttgtaaatttgtttaagttctttgtagattctggatattagccctttgtcagatgggtaaattgtaaaaattttctcccattctataggttgcctgttcaccctgatggtagtttattttgaaaagaggaagtcaaattgtccctctttgcagatgacatgattgtatatctagaaaaccccattgtctcagcccaaaatctccttaagctgataggcaacttcagcaaagtctcaggatacaaaatcaatgtacaaaaatcacaagcattcctatacaccaataacagacagagagccaaatcatgaatgaactcccattcacaattgcttcaaagagaataaaatacctaggaatccaacttacaagggatgtgaaggacctcttcaaggagaactacaaaccactgctcaacgaaataaaagaggatacaaacaaatgggagaacattccatgcccatggataggaagaatcaatatcatgaaaatggccatactgcccaaggtaatttatagattcaatgccaaccccatcaagctaccaatgactttcttcacagaattggaaaaaactactttaaagttcatatggaaccaaaaaagagcccgcattaccaagacgatcctaagccaaaagaacaaagctggaggcatcatgctacctgacttcaaactatactacaagactccagtaaccaaagcagcatggtacttgtaccaaaacagagatatagatcaatggaacagagcagagccctcagaaataataccacacatctacaactatctgatctttgacaaacctgacaaaaacaagaaatggggaagggattccctatttaataaatggtgcttggaaaactggttagccatatgtagaaagctgaaactggatcccttccttacaccttatacaaaaattaattcaagatggattaaagacttaaatgttagacctaaaaccataaaaacactaaaagaaaacctaggcaataccattcaggacataggcacgggctaggacttcatgactaaaacaccaaaagcaatggcaacaaaagccaaaattgacaaatgggatctaattaaactaaagagcttctgagtggatttttagtaaaattcagggaataaccagagacatggggcaaagcagcaacagacagcaaaaatgaagaatccaggtgcatttgctaagagtttagggaggagtaagtcttctctaagttatgaaattgaatgtaccagaacaaagaaaacaaatgaaaaactcacaggcagggtgcagtggctcatgcctgtaattggagcacttcagtaggccaaggtggaaggatcacttgagcccaggagtttgagaccagccttagcaacatgtcaagatcctgtcttcacaaaaaatacacagattagcagagtgtagtgatgcatgcccgtggtcccaagtactcaggaagctgaggcaggaggattgcttgagcccagaagtttgaggctgcagtgaactatgatcatgtcacagaactacagcctaggcagcagagtgaaaaattctctcaggtaaaggaaggaaggaaggaaggaaggaaggaaggaaggaaggaaggaaggaaggaaggaaggaaggagagagaatgagaaaaattcacaaaacatcaaaaacctggagaatttccaacacccagtttcagagatgtagactctcgagtgcatagatggggctgcatcctggaaggagctaggttcctcagcatcctgcctccaggaggaggctcctgagaaggaaaggcctggcctaggagcttaggcaccccagcttcccatgcacttgatcagtatcacctcttctccttgctagagctcttttgataagtacatgtcatcaggactttgagtagcttagagctgccaggccttgtgtctgcaagtactgatgatgtatcacaggctgtagcctgtctttctacagcctgatagacacccccatggaaatatgggagcccagcctcctctcttcaaggctcctccacggtctgaatcagaagtgtgcatcagaataacttgggagctgttttgggtcttactaccctcgcaggtccgtcccttccacttctcagtgcattgctgctgtgttgctctaattcaccttcaaaccactcaccccagggaggcttcagccacccccaaaccatgacgtcattgatgccaccatcgtattcaggacagctgttcattccctcactgtggtatgggtaggaaaatgatgcccccacctgtgttagcctcacttcaagaggcccggtaacaggatggatcccacaggattactccctctgcttagaacatgtcccgctttctccccaagaggggcacacatgctgcagcagggcaggtcaggaggggcttggagcctcactcctggtactgaatccaactttttctcccaggccctcttcctagggtgcttctttcccagggcctctgcttcctgggttcttggcttggcttccactgggcctctctcaatatgcctgccccaaactgaacgtccatccctgacatcaagtttccatgttaatggagtatttacagaggaagtgaaaagagccccaggactcccatgcccccatccaccttagtcaggctcagccaggacacctggttatgtcctcaggtacctgtctcttcacccaacagtgagcctctgggagatgaggaacacagattcaggggcccagcagcattgttttctaaatcgcccttgttctccctctgcattttactcactgggtgaccttgagtgaaggccttcctctctctttgcttccatcctcacgtctgtaagatggcaatgcagctgttacatagaggtgccaacaaggcacccttgaaactctgagagctaaattacaaaactaaggcataatagattgaggttggatggagtcaaggacatctaaaggacaggctgccttccagagcccgagcaagagaagccatgagctcagctggagcctaagggacagagccattaacaaacctaaagaccatgtcaaaggtgggggtgggagcagccctgaggcactctttgggcccttccccaggtctgtcccagggggagaggggtgggatgtgcctacatggtggagcctgatcccgtgaaattttgaagtccctctaattcctctcgcactgactttatccctgcaaatagacttccgatttctttttctccttttggtttttgtggatgaactaatgctttgtaagcactttgaaaactagaaatcattacacaaagttaagaactcactattttaacatggaggatggagcctgacatcaggcctttagggcacgttcaccatgccaagaagagaaaactaccaacttgtaaaacagcagaagcatttgctaccagctggcatgtaaagtcccctgaaaactgaacaatagagatattttcaagaaaagacaaatgatcccagtcttgggatcctgacagctgcgttgtcattgtggtttgagggcttcttgagcattgctacaccccaaagatgccttgggacagtggtgctcatctttttggaaggctattttacttagagcactgctagctgtttaacaaaaaaacccggaaatgtccgtggcttaccacaacaggagctcgcttctagcagggtgctactgtggctgttgtgggtgagcaagccgcattcctcatgtggaggttcagtgaccgtctccttccatctgtggctgtaccacccctaaggcctcagaggcttctgcagtcaatcagccaaaagagaaagatacagtgtagggggcgcgcctgctccctaaaagcagtcgggatgtgacccatcttaccgaggtaggacatcagcacttgtttctcagtcccaatgagatgaagtgaagaaaccagcagagaccagcagatggcaaggaaagggacccctggctgccctcactgtgcattagcacgagagcacaaggcactcccacaactgccatgacaatttataaatgcatggtgataaccaggaagctactgcccctttctatggcagcgacctggaaattgccacccatttcctagaaagttctaaataacccacccctcaatttgcatggaattaaagtggacataagaaagtgtaaataccattgcctgtggactctgggcgcactgcctatgaattatccctgacccacaaggaacagtactgttcaatgaaaaattgccatctcacaccactggctcgcccttgagttttttcctgggcaaagccaagaacactgccaggctaagcctcaattctggggctcacctgtccacctacatcattactctgctcatgcagcactgccaaaaaacttttcacatggccacatctggaggtaaagggaaacatatccctggccagccagcttcacaccacagaaggaggcacaggctttggggtacggctagctgacactgccatgggtcataatcccccttcaaaaacagatgaaaaccgagagctgtcttcccatggaaggagaaaaagacatggctccctaagggacccattcattcatcaacattccattgattaaatctgctactgaaggtttttgagcagagtaaacacattcatatattatattcatattcctcccccctctgtctctctgtctccccacctcttcccctaaagagagaaaaatgaattttaaaaatagaaagaaaggagggacaattcagaaacaagatatttcaaccaatatttctggaacaccaagtagagggaaaagtatttactgatgtagaaagaagaaagttggtcccaagaactgtggaagagaggtcagctccttaaaacaacagaatgctttttaaaataagaaatcagccaacaagggagattaaacatgtaattactgaaattaaaaatagaattactgaaattacagtgcaaaagaaagttttgagggtaggattgagtagaatgacaacaatttggaaaataaaaacaatatgaaaaatagaaaaaaaaaaagaatactgccagttgatactgtaagctcctggagtcaccccaccgcaagggcactggtgactagtgaggggtgcatgtcctcagcactgccatgcaagcccaggagctattagagattgtactgaagtattggagtcactagtggaaattggagcatctggaaaaatgggggagggatttttaaaactgtattttaaatatgacttttcctttgtctaaattaaagtattcaagtagctaaaactctggggcagggagggtgatcccctggtttgtgacctcactcccctgccttaagctctctgagaaagcgcatgctggttctggtctcaggaggatgtatagccatgagcttgggggcaccccaccttttatccactctgtgaatttctcttcctctcccaagtagtacatttccccaagtgggagtcagtccatctagaataatgcagtaggaagtctgtggttgtgagtccactgtaatccccaggttacatgcagagatgccccaaatccaatcacctttaaagtagtgtgaggttcaaatacactctatgttacaattatccagcaggtgaatttttaaacacacacacacatacacacacacacacacagcaaacgttaagatacacatccaaagagaaaacttgaaatctcagagagagcacaggctctgggactgcaaaatcaaatgacttttaaggaccgagtccaggcagttaagccagtcactgtgtgcagtgggcagagtggaaactggcagggctcatgccctcctccatcatgtagaggaacagctgttatttcaccccactgcacagctgctgtgtgtaagttgaactaggtttgtcagatcatatgactttctgggaaaggataggaatctagattttttttttaaattggtcaaagtattccctccattagtcttacttctttataaggccataaaaagagatgtccctctatgtgagggtctgaattttttttattaactataagttctagggtacatgtgcacaacgtgcaggtttgttacataggtatacatgtgccatgttggtgtgctgtacccattaacttgtcatttacattaggtatttctcctaatgctattcctcccccagcccccgccccgaccctacaacaggccctggtgtgtgatgttccccaccctgtgtccaagtgttctcattgttcaattctcaccaataagtgagaacatgtgtttggttttctgtccttgtggtagtttgctcagaatgatggtttttagcttcatccatgtccctgcaaaggacatgaattcatcctttttatggctgcatagtattccatggtgtatatgtgccagattttcttaatccaatctagatttttatataaaatcttcaaatatttgaacttgttaaattcaaacaaaacagtttggcctacatgtggatgcctgtttactgtttctggtttgaattcattgttttaaaaagagacaatgtgtgaagccttccctgccttggacagtggagtgggctcctttgtcaacaatgtttagtagccttgctgctttcctgagtcactgcgcccttccatgtggcacacaggggccggattaaacagttgggggtggcacaaggatgtgtctttccgcgggtcattttttgaagtaaaataaaagacacagatatatacatcagacacacaagcgcagcacagcacaagatggaaaatgattcattctgttctgcaggtgctacaggaatttgaagaagagaggtcagttcggaccagagactttcaggcttcctggaagaggtggggtagaactccatgtcaccccatgaaatgtgggacggctttcaggacaagttcctgccctggaaataaaaagaagtggggtgtgggactgcaaagaacctcaagggtctacgcagtgaaatgttaattataatgctcattcatttatctctgggtctataaaaggaataaagtggaaaagaagttggacaggagcctccacactagccaaggacatggacaaggagagagaaaaacacagtttaaattcatggtgttcagcagagaaaggagatcttgtaagcaaatgttaattaagtacaatttgaaaatgagtttatagcatcagtgccacactgcggtagttccaattaatctccaacattcctttcatgatccatgaatgtctacctctttacctgtgatggaagagtatagcttgaatggtcattatggttcaaattaaaataactcatctctagcatatgagatatatgagtcacccattttcacaacttaatttatacttgattctcaacaacaaaaaacaaataaagatgtgatttagctctgctctaaacccagactccagtccctatctcctccaaatcatctatcttgctgtaatcaacatttttatttcattttattttatttttatttttattttttgtagagatggagtcttactatattgctcaggctggtcttgaactcctggcttcaagtgatcctctcacctcagcctccccaaatgctaaaattacaggcatgagcaccactgcacctggccctgaattttctttttaaatcacaaatcaaatcatgtcactgccctacttagcatccttcaaaactgacccatagacactgaagctttggtttagcacaaggtggggccctgtctgaaccagaagcatgcacgtttgaggaggaagtggtagctgactataacatttaatatgtctcactactgtagtttttgacgtgcttttttcactccaacccaacagaaaatgacacacccatattatgggtgaaaaacaattgctgtgctagctagccattattaataatgagcatgtataagaggcttctggcaaatttggggtaggagaaacacttgagaacagagagatgagtgattaagacagataaagtcctagttccaaagattggcacatgatgacctgctctgatattttccagagtgtgcatgaaatatggtgttagaggctaatagacccagcattaaatcacactaaattgtagagaaaaaatatttttagcttttaagatttattttgtcctattttattttacaaattaaaaagagaaagtttccatttgggcaaacatatcgttagcagtattttagccgaagcattttgactgctgtttaaaaaaaaaatcctaaaatctcagtgaatttacacaatccaaagtcattttttattcagtgagtacgattatggggcagcctttcacacagtgactcatgatccagtttcccagactcccttgctgtgggctgtggttatgtgactgagttctatccaacggaatgagacagaagtgattgagtgcctcccacacggtgacccaaggaccacattttctgccatcctgtggctctgccatctgctagggtctcagagatttttatctggctcgtttttattcaactaacagagaaggagaagagagggaatgtgaaggcagcatggaagtttattatgaaagtccttgaagaggtactcatcacttctgtctcatttcattggctagagctcagtcacatgatcacagcccactgcaaagaattctgggaaatgcagtcatgctgcatgcccagaaagaaggctttgagtaatctcctggagatgctccataatatggcaggcactaagacttcaggcgtggagccttcccaagtagtgccattttcactagagtttaataacattgttttgttttcattctacttattttatgttttccatttttagcaattgaaactggtttttcttctatggcagaaatataaaattttcttacaaaatgaatttaaattaagaaaagcgaatctatttaagaaaaaaatgaataaataaataaaagtagaatacagaaatcacaaaatctactatggaaacacatcaatgaacacttcattatttgatctacttttgaattagtttttcagtctaattttcagagactctgcttctgcccacaacttctcacagtaagtcaacttgcaagctatcctctcattgagctctggctggccatgaatgaggagaccaattttctactaccaaaattaaaaacagtgaccttttcccaattctcaggagcaaactatttatgtaataaaccaaatattctcctacttttaatttccctttattaatttaaaaaaatgctttggcacttagctgctggatctaacatgaggcttagaatgatatcatatattgacttatttgaaattacatttaatatatctcaagttcattatattctacaacaacagcaaaaaaagagcaaggcatccaggtgagctgtgttccaaacaagttacagaattatgccacagcatttgctgatttcatccgcatgtctccctgtccctgctccccctcccaaacccgttcatgtctttctcctacctccataaggtcactcaaatatgtctacctccccttaccgtccaccaccactactgcctaccatcttgtaatcctcaatctcctcctcattcctactgttttcagacccatcctccacccctgcggcctttgtgacctctctaaaatcaaaatctcatcatgctctttcttgcttaaaacttttaaatgttgctccatttgtccacagaataaacatcacacttctgaccttgacccatctggcccatgaggacttttttctgctgacatggccagcctcacctcctctcagcttcccagcatccccaccgtgcggggccccagcccaagattctctctctacttaacaaattactcctttcctttcctgctgccaaagagctcactttcgcctgataaggccaggtgagggcttctcttatgagctcccacagcacactgtgcttatcatttttatatcagacattgtaaaccaggcttattttgagctccaagaggatgctgattatgtttttttttatttttatatccccagtgttaaattgaactacttatagtagacactcaagtatatgtaagaaggtttctgttttgttttgtttttgtctgtccagaaactctcctgacatctgtttcaagcacctcttgtttgggagaattgctcctttcccctccaactgaggtcttcagaggctcctatatgtagtctctggccaatccaagtcaagccaatcactgttcttcctggggatttttcaaactgaaattcaggaaaaagtactggtcctatgatggtaacaaagctgagaaatgtgagtgggccaagggcagagcaaggcatgcagaaaagtcatgtatcaatgcagaagacggccagcagcaaagagattatcagctcccctttgttttaggtataaaaataaaatgtctagaagtggttcaatcgcactttaaccaaatccaagctactattaagtgagaaagcaattcagtgcattaaagtaagaatatgcaaggttcaccttttgaatatttcaaactttctcatgagcttacctccccaatgagacattaaattgcttgaggcataaactgtctttatgttacacagaacttagtgtaaggctgggcacaaagtgggacttatgaaaagaatcagatggaatgaatgagtaaaggaaggcaggcatgaatgtaatgtctcaagttatattactctagaatgtttaagagctttatagccataatgcaaatgtatgctctgactcgaccaggttgacctacgagatcttgttctcaaacccgaattccatgtcccatgagatctggagctgccactccaacactggtacagtgctgccactctcttgcccacgcatttctcagcttcctgcagccatgtgcattctccaattcatcccatatcaacttgagtttcaaaacctagagtcatcacaggtttttaaaaggaacagcatcacactaagtatctcatgtttttgtttttgtttttgttttttgtagacttcattgagatttatgggaaagttcacaacacacagtacctcactcccaccctctcccagcctctctttccctctctctttttctgcccccacgccctctgcagaagacaacaacaacaacaacaaaaacctgaattattccccttgggtcatgcaaaacacacctgcccacatccaggccctctaggaccccagtcctctacttttagaagcttatcaaagttcgtcttccaaatgcatccagcagcctcccaagaaaaaataatggtcagtggcactttcttcattacactatatagttattctaaaattccaataggaagtgagaactttccaataaaatctttgaggatttacacagcccgtgtgaaaatactcatgacagaaagagcaacagaacccggcgcgcaggaactaaaaatatttttaacattaattgcaattaaagcagaactctaagagatgacaagttacctaacacacattcatctgtgtgaaaagaaacctttcaacacatagaagctccctgatatgctgcctcaaaatactcaatcagggagaaattcagctccaaagaggtattttgatagatgcttccaatcagtagacacaagaacagggtggcatgccatgttcgttttggggctgccatccatctgtaggttatcaaaacaggcccgcactgatgaagatatcctgaaccaagcggcagaaactgcaatcatactgattttcactcagaataaacaaatcagattttcccttgggagcagccaagaaagtctgtgtggccagcttgaaaataatatgttgctgtcagcccagcatccattagcagccgctttcttctggtaaaaacaaacaaacaaaaaaagcagtgctgttgtgttgttggaaaatggttatctggtgccccctggttctgacactactgaatttccaaggagagtactgaatcattgagtttcaaatttcccagttctttgtcttaaagagctatttggcccataggcccagttgggggcacaggtgagcagaagctgaggctacccaatgggacaaggcagacattggggagcagtcaattcccaagccacccatagagctacaggtaaattgctgtcctcacctggagaatgagtgcttgcctcagccttgagaagaagctgtcattacacacagaatggaactaatgaaactttctattctgagctccccaaatcttccttagcatgggaatttttctgcaggtgcagtgtctgatgcagagacactcctctccccaggtgtcaaaagaatcctttgtgcttcaagatgcagggagtgattgatgagaagcccgtgcacagaaaagaaatcactcaactctttcaacagaaattattatctgctgagtgccaaagatgacagcaggctttatgaaattatggagcatatatatataaaatgcatgtatgtgtgtatatatatgtatacagacatacatacacacagaagtattggataccttgatatgtgtaccaagcacttaaatgcattgtgtgtaagctccgtggtgcttacagtttatcaagtggatttataaaattatgaattaagacaatgcacaatatctgcctaaagaaagttccaaacatgtggttccagaggttcaggggacagaggaaaaaaacataaaggagaaaccagacacccacggcagagagaggctttcctctcttacgtcagagatggcatcaaaatgtatttcaggcccagggcattggctcatgcctgtaatcccagcagttagagaggccaaggtgggaggatcacttgaggccagaatttgagaccagcctgggcaacatagaaagatcccagtctctacaaaaaaaaaaaaaaattaaaaatcagccaggttttgtggtaggcacctgtagtcccagctacttgggaggctgaggtgggaggatcacttgagtccaggggttccaggctgcaatgagctgtgtcaacagggcaggaccttgtctctcaaaaaagaacaattgtgatctgtttaggatgttttgcccgtcttgctgtgtctttattgcaagggttccaatagcacctgaggtagtttgtagactctggttctgtctaataaattggcttcttcaggtgtctatttgcatatgttgatatcacagaatgaagaaggcctggagcaggacattttccattcagatccctgaggacagtggaggcagaggcagagagatgcagagggcaatatccccacagggacgagtgcagagagcttctctgcaggagaaagatgagggcattgtttccacggggatttttttgagggctgaggcacaagcagccacgctttgacacaaatcccgcaaaaaaaaagctctcaggaaacaaagcacaaaacccggacttcttctctcctttcttgtgaaagctgctacctcagaggagcgagcatgggaaaggagactcctgttcacaggaggctaccagcagactttggaaagaggggatagaactcctggatccatcctggaaggcgggttgtcacctagggctctttgtcagcaggaggggcacagctgaggtggagcccaggagaggctgtggctcttatcaggacctgctgggcccagaaagcagagccacaaaagatgcagggatcgccatgcaggctcctccccgcctctcccaggaaaccagacacccacggcagagggaggcttctggagctcatgctcaccctctctcacaatgcttaaatccatggtggtgcttagaatgttaggaaccaaggcaaaagccccagattcacaactggatgaatggtgctaacagaatccaaatttagttggagacagattttcacacttatttgtttcccaaagtttaattttcataaattttcattttagaatactactgttctttccatggccaccctatttgtccatcccagtttaatctggggccattgtcaacatcagccccaaaaagtacacctgaacccaccacacaccagtcactacattggccagaggaggaccagccatggcatagacctcctatcagggtgaggtggtcactcagaggagatccccggaaggcccttcctggtcagaggagatccccagatctctcctggcttctcctggcctttgattaggaactcaggacaggcagaagcccctgaactaccatcaccctcactggcagagatggtggattccacaagaatcacctctggagagctttggccatgggcttcggaactcttcatggcaccaacctgccttagcacctgttctcctaggttttcttctccatctctgccatttctggaactgtcagttacttccctggaagagacatccaagtcttaccatgggaaacctagatctgcctttttaactctgcccgactcccaggcactagaagaggggctgagggaattgggctgatggctcatcagccaccagctctcctagatgtcgttgcatccctgcagctaatgctggtggagatcacccaggagaagctcacagcctcccacaccacagcagcttctctaacgggagcagggtcctctggcttggccactcccgcagtattctcaagagagaaagcaaaaaagagaagcatcttctgctcccgttttaagtttctcttcccttctcaccatgccacaccagtgcaatggtgaataaataaagcagaatgggtgtcatcacccagaggagtcagcttcgcattgtcagagaagtcactgagcaccaagacctccttctggggagaaacagaggctgggagcggatgctgtgggaggagtcatggtgcagcatctggggcttgtggggaggaagcacagaaagcaaaggtccgagaaccccgcatcacatgcccttttcaacactcagcctctgtcagtcagtttgttctttatgcagaaagagagatcaggaggaagaataggagagttgaaaagggcaagaaggttcaggaaaatggcttggtggaaaataccaagctgttgctttgatttggagcttctttctttccacagctcatcatctgcttccaccccagggtgatttcagctgtcatccttccttctgatcctgcttccatttcagctctgggatgtctgcagccatgtctcttccagccccagtctctccatcccttcccctttccccactccgtcttcacatgagatgcacactctgagtgcccttctaaacagctgcaccttctaattctctctagagaacattagctctttggtctcctcagcaccaaccgtctcgagttgtctcagctacggagatacagagccttcctttcctcttaggagcatcactccttccctatctatgcatttaatcagaatgggagctgtcacatctttctgaggggtggcatctatcctgagctaatctaaatatgtgtacccacaatggcaggagtgcttggtccagggacggagcacaaggcagatcagtcgcaatgctgtcatgaggatttctaactgaagctgaggcatgaagtatggaaataaacaaagaccaacaaaatgagaactaggaaagcctatgtattcagagctttcaatggagccaaccaccatcattcgcattttagcatcactcagggtcagacagaggagtgggaaagcattttagtagaaacaagggaaggtttcatgtgcgccctgattgaaggctgttggcacagggaagctgtaggcctgctacctagaagagggggtcctaggcagtaggttaggggtgcatatttggatttatctgattggccttaatttggaagcagggacaaacattaggaaatctgtcaattataaatcaagtcttgaccatttggggttgattgttttagaatttattgttgagcttccccgattttcgctagagaagagccatctgactttctatatgtctgacatatcagactggcatcctggcctgtttattgtatataaatgggccagtttcctgggtgggtttgatggaggttgtgggtcaaagtttcatctttctatgtggtctggccactgtccagttgtatgtccagtgtctctgtaattaagatgatgaggacctacaggtggccaggtttttctcccttgtaagaaataatcactgtaagaatgaggccaggccaggcacagtggctcacacctgtaatcctagcactttgggaggccgaggtgggtggatcacctgaggtcaggaatttgagaccagcatgaccaacatggcaaaaccccgtctctactaaaaatacaaaaatttgttaggtgtggtggtgcacgcttgtaatcctagctacttgggaggctgaggaattgcttgaatccaggcagtagaggttgcagtgagccgagatcatgccactgcaatccagcctgcatgacaggagcgagactccatctcaaaaaatcagaatgaggccaataagcagagagaagtgagaatgaaagagaatgaaaggccaacaatagcctgggtgctgtttgagctcctggtcctagccattctaaggatagctgcatttctggcattctttgtggatttctgagtcaatccttcctttgatgttaagagccaatagttaccatttatgactgctaatttgagttatgtggcaccaggggagtcctgccctgcctcctcactggtggcttccccgccactggcccagtgttccttcccattcctcgcctgccatgatccctgacatctaatgctggtcatcagaagcctgtatgaatccacaccttggcagctttccttcttccctccttcagaccctccagcttccactgccccttttgggatcctctgatcaaccctgtaaatctcctgcagcctgactttttgttccacttccctgcatgctttcccctcaggggttgtccactcacggggcctcagttatcacttctaagtggcttccaggttcctgggcccagcactgattctctcctacctgggccccagcattaccgacccagtttcccatcttcccagcagcctcaccaggtctcgcaaggaactcggcaccttccacagcaaatgctgtagggtttctgttgggaagcaggctatagctctgacactgctgagccgcaaatgtgaagtcctgtctgggcttcttcccatttcctcttatgtctcatccatagacacagcagaaattgtcatcttcacaggaaacagagacttcaagggctttcccaaagtcagaagactcatgagcagcagagccagcacatctagaagctgcgctatggcattttccaagccacgcttccttggaaccctctggaaccacagcacagctctcaaggagacaggctgctgtaggggcttaggatacatgtccagctgccccagtgacagcctcactgcccaagctggagggctgaggctgaaaaatcttataaatgccatggactgagtcttgtcttggttttatccacacattctccccaagaatttccccacaaataaatttatgtaaccagatcatctctacaaggtatgtccctgttcaaccccaatgtagagaatctgagtcttaaagagtcaaaaggaacccagaggctacctcatagagacctgtgcacagcacacactgccccattcctcagcgcaggcaaatagccctcaagactcagctcaaacagctctgtgctgggaagccaccagaacagccttcaaattcatgagtgactttggtggaaagacttcctgatgctaaggtgaattggggcacagcttccgcccactgtgaattctccatccgaagccacatggcagccttccagaagcaccaagccttcctcagccagtccccactatgcctcttttctcaggctcagcatcctcagtcctccaggtgacctgatttccaggcactttccccctggccttttcccacctagactgccagtcacctgtttaacagatgcctccctaa
